(19) United States
(12) Patent Application Publication
(10) Pub. No.: US 2026/0117244 A1
(43) Pub. Date: Apr. 30, 2026

(54) INHIBITORY RNA FOR THE CONTROL OF PHYTOPATHOGENS

(71) Applicant: The Regents of the University of California, Oakland, CA (US)

(72) Inventors: Mary C. Wildermuth, Berkeley, CA (US); Jyoti Taneja, Berkeley, CA (US); Amanda G. Mcrae, Berkeley, CA (US)

(73) Assignee: The Regents of the University of California, Oakland, CA (US)

(21) Appl. No.: 18/555,503

(22) PCT Filed: Apr. 19, 2022
(86) PCT No.: PCT/US2022/025330

§ 371 Date: Oct. 13, 2023

Related U.S. Application Data
(60) Provisional application No. 63/176,795, filed on Apr. 19, 2021.

(51) Int. Cl. C12N 15/82; C12N 15/113

(52) U.S. Cl. CPC C12N 15/8282; C12N 15/113; C12N 15/8218; C12N 15/8243; C12N 2310/141; C12N 2310/531

(57) ABSTRACT

In various embodiments, target phytopathogen genes are identified whose downregulation can facilitate control or prevention of an infection of a plant by a phytopathogen (e.g., a phytopathogenic fungus). In certain embodiments, double-stranded RNAs are provided to effectively downregulate the target genes.

### CROSS-REFERENCE TO RELATED APPLICATIONS

[0001] This application claims benefit of and priority to U.S. Ser. No. 63/176,795, filed on Apr. 19, 2021, which is incorporated herein by reference in its entirety for all purposes.

### STATEMENT OF GOVERNMENTAL SUPPORT

[0002] This invention was made with government support under Grant Numbers 1617020, and 1919244 awarded by the National Science Foundation. The Government has certain rights in the invention.

### INCORPORATION BY REFERENCE OF SEQUENCE LISTING PROVIDED AS A TEXT FILE

[0003] [Not Applicable]

### BACKGROUND

[0004] Powdery mildews are widespread obligate biotrophic pathogens of plants. There are hundreds of species that together infect over 10,000 plants including crops like wheat, barley, grape, and cucurbits, and ornamentals like rose (Agrios (2004) Plant Pathology, 5th ed. Elsevier Inc.; Kuhn et al. (2016) Biotrophy at Its Best: Novel Findings and Unsolved Mysteries of the Arabidopsis-Powdery Mildew Pathosystem. The Arabidopsis Book 14, e0184. doi.org/10.1199/tab.0184). Although they do not kill their host, they can significantly reduce crop yield and quality. Furthermore, infection by powdery mildew often increases likelihood or severity of secondary infections. Resistant varieties or costly integrated pest management strategies are frequently used to prevent infection in susceptible plants. Managing powdery mildew of California grapevine, for example, is quite costly with 74% of pesticide use directed to its control (Fuller et al. (2014) Economics and Policy, 3: 90-107). There are mixed opinions among wine grape growers on the use of powdery mildew-resistant varietals. Although their use would save growers time and resources in managing powdery mildew, there are concerns about taste and having to label wine varietals differently (Id.). With powdery mildew fungicide resistance emerging in several regions and the need to apply fungicides every 1-2 weeks, new options are desired (Frenkel et al. (2015) Phytopathology, 105: 370-377).

[0005] Powdery mildews are filamentous ascomycetes belonging to the order Erysiphales, a monophyletic group within Leotiomycetes (Belanger et al. (2003) The Powdery mildews: a comprehensive treatise, Choice Reviews Online. American Phytopathological Society, St. Paul. doi.org/10.5860/choice.40-5806; Glawe (2008) Ann. Rev. Phytopath. 46: 27-51). The Erysiphales are divided into 5 tribes based on host range and history (Takamatsu (2004) Mycoscience, 45: 147-157) and individual species have been renamed and classified as more molecular-based relationships have been uncovered. As obligate biotrophic pathogens, they must infect and feed from a living host in order to obtain nutrients and reproduce. The powdery mildew fungus, Golovinomyces orontii, historically known as Erysiphe orontii, infects the model plant Arabidopsis thaliana, tomato, tomatillo, sunflower and eggplant (Kallamadi & Mulpuri (2020) Biotech, 10: 1-6. doi.org/10.1007/s13205-020-02224-2; Utkhede et al. (2001) Canadian J. Plant Sci. 81: 179-182: Plotnikova et al. (1998) Mycologia 90: 1009-1016). The life cycle of G. orontii begins when a primary germ tube grows from the spore and develops into an appressorium which pierces through the tough cuticle surface of the leaf using turgor pressure. Unlike other pathogenic fungi, powdery mildews do not encode many cell wall degrading enzymes which are often secreted to facilitate entry into the plant (Spanu et al. (2010) Science, 330: 1543-1546). This limits the amount of cell wall breakdown products produced upon entry which can elicit a defense response from the host. Before penetration into the plant, glycogen and lipids stored in the conidium are consumed to fuel its development (Both et al. (2005) Plant Cell, 17(7); 2107-2122). After the powdery mildew enters the plant in the epidermal cell layer, a feeding structure (haustorium) develops and is enveloped by the plant cell membrane (Koh et al. (2005) Plant J. 44: 516-529). This is the primary site of nutrient uptake where glucose and other metabolites are acquired by the fungus. Hyphae grow epiphytically, branching out from the initial germinating conidium, with additional feeding sites supporting growth as the colony expands. Most powdery mildews develop in this fashion; however, there are two known species of powdery mildew that enter leaves through stomata to infect mesophyll cells instead of epidermal cells. By 5 days post infection (dpi), the G. orontii lifecycle is complete with the emergence of fully formed asexual reproductive structures (conidiophores). These conidiophores are stalk-like structures that grow from hyphae. They contain a basal cell and a chain of conidia (spores) that protrudes up and away from the leaf surface. The number of conidia per conidiophore varies with powdery mildew species; for G. orontii MGH1, approximately 5 conidia per conidiophore are typically observed at 5 dpi (Chandran et al. (2010) Proc. Natl. Acad. Sci. USA, 107: 460-465).

[0006] For G. orontii infection of Arabidopsis used in laboratory research, only asexual reproduction is observed. At 5 dpi, the diameter of G. orontii colonies can be over 1 mm. Days later, the mass of spores produced becomes visible to the naked eye. In nature, these infective spores can be transferred by wind or animals, but in the lab, plants are often infected by dusting through mesh, brushing, or spraying spore suspensions (Id.; Micali et al. (2008) The Powdery Mildew Disease of Arabidopsis: A Paradigm for the Interaction between Plants and Biotrophic Fungi. The Arabidopsis Book 6, e0115. doi.org/10.1199/tab.0115). Asexual reproduction propagates powdery mildew disease over the growing season in the field. However, sexual reproduction can occur to remain viable during overwinter periods (Kuhn et al. (2016) Biotrophy at Its Best: Novel Findings and Unsolved Mysteries of the Arabidopsis-Powdery Mildew Pathosystem. The Arabidopsis Book 14, e0184. doi.org/10.1199/tab.0184).

[0007] Sequence analysis of powdery mildews has revealed significant gene loss and genome expansion compared to other related plant pathogenic fungi (Spanu et al. (2010) Science, 330: 1543-1546). As obligate biotrophs, powdery mildews have evolved an intimate relationship with their hosts to acquire nutrients. This parasitism has led to the reliance on the host to provide specific metabolites, reducing the evolutionary pressure to maintain genes and complete metabolic pathways often conserved in ascomycetes. Other plant obligate biotrophs from diverse lineages also exhibit significant gene loss and shared loss of the same metabolic pathways or pathway components (Spanu (2012) Ann. Rev. Phytopath. 50: 91-109). Within published powdery mildew genomes, there is a high degree of gene conservation with ˜71% of powdery mildew genes conserved in all powdery mildews and ˜81% conserved among dicot powdery mildews (Wu et al. (2018) BMC Genomics, 19: 705. Though the number of genes is reduced, the genome size of the powdery mildews is significantly larger than other fungal genomes due to the proliferation of retrotransposons and the loss of mechanisms to control transposon propagation. Powdery mildew genomes can be over 120 Mb while other related fungal pathogens have an average genome size of 37 Mb. This proliferation has been left unchecked by the loss of genes responsible for repeat-induced point mutation mechanisms. Because their large genomes are full of repetitive elements, it has been difficult to sequence powdery mildew genomes.

[0008] As powdery mildews cannot be cultured (grown independent of the plant host), it has been difficult to study the function of specific genes in powdery mildew colonization, growth, and reproduction. Consequently, development of genomic tools to regulate powdery mildew colonization and/or growth has proven challenging.

### SUMMARY

[0009] As described herein gene targets are identified that when down-regulated or inhibited result in reproducible and statistically significant reduction phytopathogen growth and/or infectivity and, in particular, powdery mildew. Accordingly, in certain embodiments, effective dsRNA (long dsRNA and/or short interfering RNA (siRNA) are provided that can be used for topical application (e.g., spray-induced gene silencing (SIGS), soil or root application, or host-induced gene silencing (HIGS) to regulate plant pathogens (e.g., to control or prevent an infection of a plant by a phytopathogen (e.g., a phytopathogenic fungus)).

[0010] In particular, the gene targets described herein are highly conserved and believed to function in metabolism, regulation, manipulation of the plant host and essential cellular processes, and are important, inter alia, to powdery mildew (and other phytopathogen) growth and reproduction.

[0011] In various embodiments, use of the identified novel powdery mildew gene targets for fungicide development or resistant plant development by any means are provided. Additionally, the methodology (screening system) for the rapid identification of suitable target genes is provided. Additionally, methods for prioritizing target genes for screening are provided.

[0012] Accordingly, various embodiments provided herein may include, but need not be limited to, one or more of the following:

[0013] Embodiment 1: An isolated double stranded RNA (dsRNA) for controlling or preventing an infection of a plant by a phytopathogen, wherein said dsRNA is capable of inhibiting or downregulating (e.g., downregulates) expression of one or more target genes selected from the group consisting of a gene involved in lipid metabolism and/or acquisition, a gene involved in triacylglycerol (TAG)/glycerolipid metabolism, a gene involved in the pentose phosphate pathway (PPP), a gene involved in the tricarboxylic acid (TCA) and/or glyoxylate cycle, a gene involved in fatty acid synthesis and/or transport, a gene involved in lipid catabolism, a gene involved in fatty acid degradation including fatty acid B-oxidation, a gene involved in carbohydrate metabolism, a gene involved in glycogen metabolism, a gene involved in glycolysis, a gene involved in carbohydrate utilization, a gene involved in amino acid and/or nucleotide metabolism and salvage and/or cofactor metabolism, a gene involved in amino acid metabolism and/or salvage, a gene involved in cofactor metabolism, a gene involved in nucleotide metabolism and/or salvage, a gene involved in an essential fungal-specific process, a gene involved in sterol biosynthesis, a gene involved in mitochondrial electron transport and/or ATP synthesis, a gene involved in mitochondrial electron transport chain, a gene involved in transcriptional regulation, a gene involved in protein regulation, a gene involved in nucleic acid translation, a gene involved in signaling, a gene involved in producing a secreted protein, a gene associated with the plant TCP interaction network, a gene associated with a plant hormone pathway, a gene involved in jasmonic acid (oxylipin) metabolism, acquisition, or signaling, a gene involved in abscisic acid metabolism, acquisition, or signaling, a gene involved in cell cycle and DNA replication, a gene involved in vesicles, autophagy, and phagocytosis, a gene involved in autophagy and phagocytosis, a gene involved in ion/metal transport and osmotic homeostasis, and single copy genes in G. orontii MGH1 following recent whole genome duplication including those with unknown function.

[0014] Embodiment 2: The isolated dsRNA of embodiment 1, wherein said dsRNA is capable of downregulating (e.g., downregulates) expression of one or more target genes selected from the group consisting of a gene involved in lipid metabolism, a gene involved in fatty acid (FA) synthesis and/or transport, a gene involved in carbohydrate metabolism, a gene involved in amino acid and/or nucleotide metabolism and salvage and/or cofactor metabolism, a gene involved in nucleotide metabolism/salvage, a gene involved in an essential fungal-specific process, a gene involved in mitochondrial electron transport, a gene involved in transcriptional regulation, a gene involved in nucleic acid translation, a gene involved in signaling, a gene involved in producing a secreted protein, a gene involved in plant hormone metabolism, a gene involved in cell cycle and replication, a gene involved in autophagy and phagocytosis, and a gene involved in cell volume control.

[0015] Embodiment 3: The isolated dsRNA according to any one of embodiments 1-2, wherein said dsRNA inhibits or is capable of downregulating expression of one or more target genes shown in Table 1 or Table 2 (SEQ ID NOS:1-211), and SEQ ID NOs:255-411, and/or orthologues thereof.

[0016] Embodiment 4: The isolated dsRNA of embodiment 5, wherein said target genes and/or orthologs comprise one or more target genes of SEQ ID Nos:1-84, 86-211, and 255-411 and/or orthologs thereof.

[0017] Embodiment 5: The isolated dsRNA according to any one of embodiments 1-2, wherein said dsRNA inhibits or is capable of downregulating expression of one or more target genes shown in Table 1 or Table 2 (SEQ ID NOS:1-211).

[0018] Embodiment 6: The isolated dsRNA of embodiment 5, wherein said target genes and/or orthologs comprise one or more target genes of SEQ ID Nos:1-84, and 86-211 and/or orthologs thereof.

[0019] Embodiment 7: The isolated dsRNA of embodiment 5, wherein said target genes and/or orthologs comprise one or more target genes of SEQ ID Nos:1-178 and/or orthologs thereof.

[0020] Embodiment 8: The isolated dsRNA of embodiment 7, wherein said target genes and/or orthologs comprise one or more target genes of SEQ ID Nos:1-84, and 86-178 and/or orthologs thereof.

[0021] Embodiment 9: The isolated dsRNA according to any one of embodiments 1-5, wherein said target genes and/or orthologs comprise one or more target genes independently selected from the group consisting of SEQ ID NO:1, SEQ ID NO:2, SEQ ID NO:15, SEQ ID NO:20, SEQ ID NO:21, SEQ ID NO:22, SEQ ID NO:32, SEQ ID NO:63, SEQ ID NO:64, SEQ ID NO:70, SEQ ID NO:71, SEQ ID NO:79, SEQ ID NO:87, SEQ ID NO:92, SEQ ID NO:104, SEQ ID NO:122, SEQ ID NO:123, SEQ ID NO:124, SEQ ID NO:140, SEQ ID NO:141, SEQ ID NO:145, SEQ ID NO:146, SEQ ID NO:148, SEQ ID NO:149, SEQ ID NO:163, SEQ ID NO:164, SEQ ID NO:167, SEQ ID NO:169, SEQ ID NO:179, SEQ ID NO:180, SEQ ID NO:181, SEQ ID NO:182, SEQ ID NO:183, SEQ ID NO:184, SEQ ID NO:185, SEQ ID NO:186, SEQ ID NO:187, SEQ ID NO:188, SEQ ID NO:189, SEQ ID NO:190, SEQ ID NO:191, SEQ ID NO:192, SEQ ID NO:193, SEQ ID NO:194, SEQ ID NO:195, SEQ ID NO:196, SEQ ID NO:197, SEQ ID NO:198, SEQ ID NO:199, SEQ ID NO:200, SEQ ID NO:201, SEQ ID NO:202, SEQ ID NO:203, SEQ ID NO:204, SEQ ID NO:205, SEQ ID NO:206, SEQ ID NO:207, SEQ ID NO:208, SEQ ID NO:209, SEQ ID NO:210, SEQ ID NO:211, and SEQ ID NO:85 and/or orthologs thereof.

[0022] Embodiment 10: The isolated dsRNA of embodiment 9, wherein said target genes and/or orthologs comprise one or more target genes independently selected from (Table 2) the group consisting of SEQ ID NO:1, SEQ ID NO:2, SEQ ID NO:15, SEQ ID NO:20, SEQ ID NO:21, SEQ ID NO:22, SEQ ID NO:32, SEQ ID NO:63, SEQ ID NO:64, SEQ ID NO:70, SEQ ID NO:71, SEQ ID NO:79, SEQ ID NO:87, SEQ ID NO:92, SEQ ID NO:104, SEQ ID NO:122, SEQ ID NO:123, SEQ ID NO:124, SEQ ID NO:140, SEQ ID NO:141, SEQ ID NO:145, SEQ ID NO:146, SEQ ID NO:148, SEQ ID NO:149, SEQ ID NO:163, SEQ ID NO:164, SEQ ID NO:167, SEQ ID NO:169, SEQ ID NO:179, SEQ ID NO:180, SEQ ID NO:181, SEQ ID NO:182, SEQ ID NO:183, SEQ ID NO:184, SEQ ID NO:185, SEQ ID NO:186, SEQ ID NO:187, SEQ ID NO:188, SEQ ID NO:189, SEQ ID NO:190, SEQ ID NO:191, SEQ ID NO:192, SEQ ID NO:193, SEQ ID NO:194, SEQ ID NO:195, SEQ ID NO:196, SEQ ID NO:197, SEQ ID NO:198, SEQ ID NO:199, SEQ ID NO:200, SEQ ID NO:201, SEQ ID NO:202, SEQ ID NO:203, SEQ ID NO:204, SEQ ID NO:205, SEQ ID NO:206, SEQ ID NO:207, SEQ ID NO:208, SEQ ID NO:209, SEQ ID NO:210, and SEQ ID NO:211, and/or orthologs thereof.

[0023] Embodiment 11: The isolated dsRNA of embodiment 10, wherein said target genes and/or orthologs comprise one or more target genes independently selected from (Original Table 2) the group consisting of SEQ ID NO:1, SEQ ID NO:2, SEQ ID NO:15, SEQ ID NO:20, SEQ ID NO:21, SEQ ID NO:22, SEQ ID NO:32, SEQ ID NO:63, SEQ ID NO:64, SEQ ID NO:70, SEQ ID NO:71, SEQ ID NO:79, SEQ ID NO:87, SEQ ID NO:92, SEQ ID NO:104, SEQ ID NO:122, SEQ ID NO:123, SEQ ID NO:124, SEQ ID NO:140, SEQ ID NO:141, SEQ ID NO:145, SEQ ID NO:146, SEQ ID NO:149, SEQ ID NO:164, and SEQ ID NO:85, and/or orthologs thereof.

[0024] Embodiment 12: The isolated dsRNA of embodiment 11, wherein said target genes and/or orthologs comprise one or more target genes independently selected from (Original Table 2) the group consisting of SEQ ID NO:1, SEQ ID NO:2, SEQ ID NO:15, SEQ ID NO:20, SEQ ID NO:21, SEQ ID NO:22, SEQ ID NO:32, SEQ ID NO:63, SEQ ID NO:64, SEQ ID NO:70, SEQ ID NO:71, SEQ ID NO:79, SEQ ID NO:87, SEQ ID NO:92, SEQ ID NO:104, SEQ ID NO:122, SEQ ID NO:123, SEQ ID NO:124, SEQ ID NO:140, SEQ ID NO:141, SEQ ID NO:145, SEQ ID NO:146, SEQ ID NO:149, and SEQ ID NO:164, and/or orthologs thereof.

[0025] Embodiment 13: The isolated dsRNA according to any one of embodiments 1-5, wherein said target genes and/or orthologs comprise one or more G. orontii genes independently selected from the group consisting of Cytochrome P450 monoxygenase (CYP51) (SEQ ID NO:85), TAG lipase 1, caroboxyesterase domain (SEQ ID NO:1), TAG lipase A, extracellular lipase (SEQ ID NO:2), Transaldolase (SEQ ID NO:15), Isocitrate lyase (ICL) (SEQ ID NO:20), Malate synthase (MS) (SEQ ID NO:21), Citrate (Si) synthase (SEQ ID NO:22), Trans-2-enoyl CoA reductase (SEQ ID NO:32), Glutamate dehydrogenase (SEQ ID NO:63), Threonine aldolase (SEQ ID NO:64), Pf02548-Ketopantoate hydroxymethyltransferase (SEQ ID NO:70), Tetrahydrofolate synthase (SEQ ID NO:71), Thymidine synthase (SEQ ID NO:79), Pf8238-Sel1 repeat (SEQ ID NO:87), Apoptosis antagonizing transcription factor (AATF) (SEQ ID NO:92), Pf10453—Nuclear fragile X mental retardation-interacting protein 1 (NUFIP1) (SEQ ID NO:104), G. orontii effector candidate 60/61 (SEQ ID NO:122), G. orontii effector candidate 70 (SEQ ID NO:123), G. orontii effector candidate 14 (SEQ ID NO:124), Effector protein EC2 (SEQ ID NO:140), Heat shock protein 70 family (HSP70) (SEQ ID NO:141), β-carotene 15,15′-dioxygenase (BCDO) (SEQ ID NO:145), Xanthin oxidase (SEQ ID NO:146), ABA G-protein coupled receptor (SEQ ID NO: 148), Acyl-CoA oxidase (ACX_(SEQ ID NO:149), Anaphase promoting complex/20S cyclosome subunit (SEQ ID NO: 163), Pf04109—Autophagy protein Apg9 (SEQ ID NO:164), Pf03517 Regulator of cell volume after swelling (SEQ ID NO: 167), Ctr family Cu2+ transporter (SEQ ID NO: 169), Single copy gene, unknown function (SEQ ID NO: 179), Cyclin-like protein (SEQ ID NO: 180), and Alanine-glyoxylate aminotransferase (SEQ ID NO: 181), and/or orthologs thereof.

[0026] Embodiment 14: The isolated dsRNA of embodiment 13, wherein said target genes and/or orthologs comprise one or more G. orontii genes independently selected from the group consisting of TAG lipase 1, caroboxyesterase domain (SEQ ID NO:1), TAG lipase A, extracellular lipase (SEQ ID NO:2), Transaldolase (SEQ ID NO:15), Isocitrate lyase (ICL) (SEQ ID NO:20), Malate synthase (MS) (SEQ ID NO:21), Citrate (Si) synthase (SEQ ID NO:22), Trans-2-enoyl CoA reductase (SEQ ID NO:32), Glutamate dehydrogenase (SEQ ID NO:63), Threonine aldolase (SEQ ID NO:64), Pf02548-Ketopantoate hydroxymethyltransferase (SEQ ID NO:70), Tetrahydrofolate synthase (SEQ ID NO:71), Thymidine synthase (SEQ ID NO:79), Pf8238-Sel1 repeat (SEQ ID NO:87), Apoptosis antagonizing transcription factor (AATF) (SEQ ID NO:92), Pf10453—Nuclear fragile X mental retardation-interacting protein 1 (NUFIP1) (SEQ ID NO:104), G. orontii effector candidate 60/61 (SEQ ID NO:122), G. orontii effector candidate 70 (SEQ ID NO:123), G. orontii effector candidate 14 (SEQ ID NO:124), Effector protein EC2 (SEQ ID NO:140), Heat shock protein 70 family (HSP70) (SEQ ID NO:141), β-carotene 15,15′-dioxygenase (BCDO) (SEQ ID NO:145), Xanthin oxidase (SEQ ID NO:146), ABA G-protein coupled receptor (SEQ ID NO: 148), Acyl-CoA oxidase (ACX_(SEQ ID NO:149), Anaphase promoting complex/20S cyclosome subunit (SEQ ID NO: 163), Pf04109—Autophagy protein Apg9 (SEQ ID NO:164), Pf03517 Regulator of cell volume after swelling (SEQ ID NO: 167), Ctr family Cu2+ transporter (SEQ ID NO: 169), Single copy gene, unknown function (SEQ ID NO: 179), Cyclin-like protein (SEQ ID NO: 180), and Alanine-glyoxylate aminotransferase (SEQ ID NO: 181), and/or orthologs thereof.

[0027] Embodiment 15: The isolated dsRNA according to any one of embodiments 11, wherein said target genes and/or orthologs comprise one or more target E. necator genes selected from the group consisting of Cytochrome P450 monoxygenase (CYP51) (SEQ ID NO:182), TAG lipase 1, caroboxyesterase domain (SEQ ID NO:183), TAG lipase A, extracellular lipase (SEQ ID NO:184), Transaldolase (SEQ ID NO:185), Isocitrate lyase (ICL) (SEQ ID NO:186-187), Malate synthase (MS) (SEQ ID NO:188), Citrate (Si) synthase (SEQ ID NO:189), Trans-2-enoyl CoA reductase (SEQ ID NO:190), Glutamate dehydrogenase (SEQ ID NO:191), Threonine aldolase (SEQ ID NO:192), Pf02548-Ketopantoate hydroxymethyltransferase (SEQ ID NO:193), Tetrahydrofolate synthase (SEQ ID NO:194), Thymidine synthase (SEQ ID NO:195), Pf8238-Sel1 repeat (SEQ ID NO:196), Apoptosis antagonizing transcription factor (AATF) (SEQ ID NO:197), Pf10453-Nuclear fragile X mental retardation-interacting protein 1 (NUFIP1) (SEQ ID NO:198), G. orontii effector candidate 60/61 (SEQ ID NO:199), G. orontii effector candidate 70 (SEQ ID NO:200), effector protein EC2 (SEQ ID NO:201), Heat shock protein 70 family (HSP70) (SEQ ID NO:202), β-carotene 15,15′-dioxygenase (BCDO) (SEQ ID NO:203), Xanthin oxidase (SEQ ID NO:204), ABA G-protein coupled receptor (SEQ ID NO: 205), Acyl-CoA oxidase (ACX_(SEQ ID NO:206), Anaphase promoting complex/20S cyclosome subunit (SEQ ID NO: 207), Pf04109—Autophagy protein Apg9 (SEQ ID NO:208), Pf03517 Regulator of cell volume after swelling (SEQ ID NO: 209), Ctr family Cu2+ transporter (SEQ ID NO: 210), and Cyclin-like protein (SEQ ID NO: 211), and/or orthologs thereof.

[0028] Embodiment 16: The isolated dsRNA according to any one of embodiments 1-5, wherein said target genes and/or orthologs comprise one or more target genes selected from the group consisting of CYP51 (Seq ID NO: 85, 182), lipase 1 (SEQ ID NO: 1, 183), lipase A (SEQ ID NO: 2, 184), isocitrate lyase (SEQ ID NO: 20, 186-187), malate synthase (SEQ ID: 21, 188), citrate (Si) synthase (SEQ ID NO: 22, 189), trans-2-enoyl-coA reductase (SEQ ID NO: 32, 190), glutamate dehydrogenase (SEQ ID NO: 63, 191), threonine aldolase (SEQ ID NO: 64,192), tetrahydrofolate synthase (SEQ ID NO: 71, 194), thymidylate synthase (SEQ ID NO: 79, 195), apoptosis-antagonizing transcription factor (AATF) (SEQ ID NO: 92, 197), Effector candidate 2 (EC2) (SEQ ID NO: 140,201), β-carotene 15,15′-dioxygenase (BCDO) (SEQ ID NO: 145, 203), xanthoxin oxidase (SEQ ID NO: 146, 204), ABA G-coupled receptor (SEQ ID NO: 148, 205), acyl-coA oxidase (ACX) (SEQ ID NO: 149, 206), Autophagy protein Apg9 (SEQ ID NO: 164, 208), Ctr family CU2+ transporter (SEQ ID NO: 169,210), cyclin-like protein (SEQ ID NO: 180,211), and alanine-glyoxylate amino transferase (SEQ ID NO: 181), and/or orthologs thereof.

[0029] Embodiment 17: The isolated dsRNA of embodiment 16, wherein said target genes and/or orthologs comprise one or more target genes selected from the group consisting of lipase 1 (SEQ ID NO: 1, 183), lipase A (SEQ ID NO: 2, 184), isocitrate lyase (SEQ ID NO: 20, 186-187), malate synthase (SEQ ID: 21, 188), citrate (Si) synthase (SEQ ID NO: 22, 189), trans-2-enoyl-coA reductase (SEQ ID NO: 32, 190), glutamate dehydrogenase (SEQ ID NO: 63, 191), threonine aldolase (SEQ ID NO: 64,192), tetrahydrofolate synthase (SEQ ID NO: 71, 194), thymidylate synthase (SEQ ID NO: 79, 195), apoptosis-antagonizing transcription factor (AATF) (SEQ ID NO: 92, 197), Effector candidate 2 (EC2) (SEQ ID NO: 140, 201), β-carotene 15,15′-dioxygenase (BCDO) (SEQ ID NO: 145, 203), xanthoxin oxidase (SEQ ID NO: 146, 204), ABA G-coupled receptor (SEQ ID NO: 148, 205), acyl-coA oxidase (ACX) (SEQ ID NO: 149, 206), Autophagy protein Apg9 (SEQ ID NO: 164, 208), Ctr family CU2+ transporter (SEQ ID NO: 169,210), cyclin-like protein (SEQ ID NO: 180,211), and alanine-glyoxylate amino transferase (SEQ ID NO: 181), and/or orthologs thereof.

[0030] Embodiment 18: The isolated dsRNA according to any one of embodiments 1-5, wherein said target genes and/or orthologs comprise one or more target genes selected from the group consisting of CYP51 (Seq ID NO: 85, 182), lipase 1 (SEQ ID NO: 1, 183), lipase A (SEQ ID NO: 2, 184), isocitrate lyase (SEQ ID NO: 20, 186-187), malate synthase (SEQ ID: 21, 188), apoptosis-antagonizing transcription factor (AATF) (SEQ ID NO: 92, 197), Effector candidate 2 (EC2) (SEQ ID NO: 140, 201), β-carotene 15,15′-dioxygenase (BCDO) (SEQ ID NO: 145, 203), and Autophagy protein Apg9 (SEQ ID NO: 164, 208), and/or orthologs thereof.

[0031] Embodiment 19: The isolated dsRNA of embodiment 18, wherein said target genes and/or orthologs comprise one or more target genes selected from the group consisting of lipase 1 (SEQ ID NO: 1, 183), lipase A (SEQ ID NO: 2, 184), isocitrate lyase (SEQ ID NO: 20, 186-187), malate synthase (SEQ ID: 21, 188), apoptosis-antagonizing transcription factor (AATF) (SEQ ID NO: 92, 197), Effector candidate 2 (EC2) (SEQ ID NO: 140,201), β-carotene 15,15′-dioxygenase (BCDO) (SEQ ID NO: 145, 203), and Autophagy protein Apg9 (SEQ ID NO: 164, 208), and/or orthologs thereof.

[0032] Embodiment 20: The isolated dsRNA according to any one of embodiments 1-5, wherein said target genes and/or orthologs comprise one or more target genes selected from the group consisting of CYP51 (Seq ID NO: 85, 182), lipase 1 (SEQ ID NO: 1, 183), isocitrate lyase (SEQ ID NO: 20, 186-187), malate synthase (SEQ ID: 21, 188), and Autophagy protein Apg9 (SEQ ID NO: 164, 208), and/or orthologs thereof.

[0033] Embodiment 21: The isolated dsRNA of embodiment 20, wherein said target genes and/or orthologs comprise one or more target genes selected from the group consisting of lipase 1 (SEQ ID NO: 1, 183), isocitrate lyase (SEQ ID NO: 20, 186-187), malate synthase (SEQ ID: 21, 188), and Autophagy protein Apg9 (SEQ ID NO: 164, 208), and/or orthologs thereof.

[0034] Embodiment 22: The isolated dsRNA according to any one of embodiments 1-5, wherein said dsRNA inhibits or is capable of downregulating expression of a gene involved in lipid metabolism and/or acquisition.

[0035] Embodiment 23: The isolated dsRNA of embodiment 22, wherein said dsRNA is capable of downregulating expression of one or more target genes selected from the group consisting of SEQ ID Nos:1-51, 149-151, 181, 183-190, 206, or orthologues thereof.

[0036] Embodiment 24: The isolated dsRNA of embodiment 22, wherein said dsRNA inhibits or is capable of downregulating expression of a gene involved in lipid metabolism.

[0037] Embodiment 25: The isolated dsRNA of embodiment 24, wherein said dsRNA is capable of downregulating expression of one or more target genes selected from the group consisting of SEQ ID Nos:1-51, or orthologues thereof where said orthologs are found in species of phytopathogen other than the species shown in Table 1.

[0038] Embodiment 26: The isolated dsRNA according to any one of embodiments 1-5, wherein said dsRNA inhibits or is capable of downregulating expression of a gene involved in triacylglycerol (TAG)/glycerolipid metabolism.

[0039] Embodiment 27: The isolated dsRNA of embodiment 26, wherein said dsRNA is capable of downregulating expression of one or more target genes selected from the group consisting of SEQ ID Nos: 1-14 and 183-184, and/or orthologs thereof.

[0040] Embodiment 28: The isolated dsRNA according to any one of embodiments 1-5, wherein said dsRNA inhibits or is capable of downregulating expression of a gene involved in pentose phosphate pathway (PPP).

[0041] Embodiment 29: The isolated dsRNA of embodiment 28, wherein said dsRNA is capable of downregulating expression of one or more target genes selected from the group consisting of SEQ ID Nos: 15-19 and 185, and/or orthologs thereof.

[0042] Embodiment 30: The isolated dsRNA according to any one of embodiments 1-5, wherein said dsRNA inhibits or is capable of downregulating expression of a gene involved in the tricarboxylic acid (TCA) and/or glyoxylate cycle.

[0043] Embodiment 31: The isolated dsRNA of embodiment 30, wherein said dsRNA is capable of downregulating expression of one or more target genes selected from the group consisting of SEQ ID Nos: 20-31, 181, 186-189 shown in Tables 1 and 2 or orthologs thereof.

[0044] Embodiment 32: The isolated dsRNA according to any one of embodiments 1-5, wherein said dsRNA inhibits or is capable of downregulating expression of a gene involved in fatty acid synthesis and/or transport.

[0045] Embodiment 33: The isolated dsRNA of embodiment 32, wherein said dsRNA is capable of downregulating expression of one or more target genes selected from the group consisting of SEQ ID Nos: 32-41 and 190, and/or orthologs thereof.

[0046] Embodiment 34: The isolated dsRNA according to any one of embodiments 1-5, wherein said dsRNA inhibits or is capable of downregulating expression of a gene involved in lipid catabolism.

[0047] Embodiment 35: The isolated dsRNA of embodiment 34, wherein said dsRNA is capable of downregulating expression of one or more target genes selected from the group consisting of SEQ ID Nos: 42-50, 149-151, 206, _{and/or} or orthologs thereof.

[0048] Embodiment 36: The isolated dsRNA according to any one of embodiments 1-5, wherein said dsRNA inhibits or is capable of downregulating expression of a gene involved in fatty acid breakdown including fatty acid B-oxidation.

[0049] Embodiment 37: The isolated dsRNA of embodiment 36, wherein said dsRNA is capable of downregulating expression of one or more target genes selected from the group consisting of SEQ ID Nos: 42-50, and/or orthologs thereof.

[0050] Embodiment 38: The isolated dsRNA according to any one of embodiments 1-5, wherein said dsRNA inhibits or is capable of downregulating expression of a gene involved in phospholipid metabolism.

[0051] Embodiment 39: The isolated dsRNA of embodiment 38, wherein said dsRNA is capable of downregulating expression of one or more target genes selected from the group consisting of SEQ ID Nos:51, and 95, and/or orthologs thereof.

[0052] Embodiment 40: The isolated dsRNA according to any one of embodiments 1-5, wherein said dsRNA inhibits or is capable of downregulating expression of a gene involved in carbohydrate metabolism.

[0053] Embodiment 41: The isolated dsRNA of embodiment 40, wherein said dsRNA is capable of downregulating expression of one or more target genes selected from the group consisting of SEQ ID Nos:52-61, and/or orthologs thereof.

[0054] Embodiment 42: The isolated dsRNA according to any one of embodiments 1-5, wherein said dsRNA inhibits or is capable of downregulating expression of a gene involved in glycogen metabolism.

[0055] Embodiment 43: The isolated dsRNA of embodiment 42, wherein said dsRNA is capable of downregulating expression of one or more target genes selected from the group consisting of SEQ ID Nos:52, 53, and 94, and/or orthologs thereof.

[0056] Embodiment 44: The isolated dsRNA according to any one of embodiments 1-5, wherein said dsRNA inhibits or is capable of downregulating expression of a gene involved in glycolysis.

[0057] Embodiment 45: The isolated dsRNA of embodiment 44, wherein said dsRNA is capable of downregulating expression of one or more target genes selected from the group consisting of SEQ ID Nos:54-57, and/or orthologs thereof.

[0058] Embodiment 46: The isolated dsRNA according to any one of embodiments 1-5, wherein said dsRNA inhibits or is capable of downregulating expression of a gene involved in carbohydrate utilization.

[0059] Embodiment 47: The isolated dsRNA of embodiment 46, wherein said dsRNA is capable of downregulating expression of one or more target genes selected from the group consisting of SEQ ID Nos: 58-61, and/or orthologs thereof.

[0060] Embodiment 48: The isolated dsRNA according to any one of embodiments 1-5, wherein said dsRNA inhibits or is capable of downregulating expression of a gene involved in amino acid and/or nucleotide metabolism and salvage and/or cofactor metabolism.

[0061] Embodiment 49: The isolated dsRNA of embodiment 48, wherein said dsRNA is capable of downregulating expression of one or more target genes selected from the group consisting of SEQ ID Nos:62-84 and 191-195, and/or orthologs thereof.

[0062] Embodiment 50: The isolated dsRNA according to any one of embodiments 1-5, wherein wherein said dsRNA inhibits or is capable of downregulating expression of a gene involved in amino acid metabolism and/or salvage.

[0063] Embodiment 51: The isolated dsRNA of embodiment 50, wherein said dsRNA is capable of downregulating expression of one or more target genes selected from the group consisting of SEQ ID Nos:62-69 and 191-192, and/or orthologs thereof.

[0064] Embodiment 52: The isolated dsRNA according to any one of embodiments 1-5, wherein said dsRNA inhibits or is capable of downregulating expression of a gene involved in cofactor metabolism.

[0065] Embodiment 53: The isolated dsRNA of embodiment 52, wherein said dsRNA is capable of downregulating expression of one or more target genes selected from the group consisting of SEQ ID Nos:70-78 and 193-194, and/or orthologs thereof.

[0066] Embodiment 54: The isolated dsRNA according to any one of embodiments 1-5, wherein said dsRNA inhibits or is capable of downregulating expression of a gene involved in nucleotide metabolism and/or salvage.

[0067] Embodiment 55: The isolated dsRNA of embodiment 54, wherein said dsRNA is capable of downregulating expression of one or more target genes selected from the group consisting of SEQ ID Nos:79-84 and 195, and/or orthologs thereof.

[0068] Embodiment 56: The isolated dsRNA according to any one of embodiments 1-5, wherein said dsRNA inhibits or is capable of downregulating expression of a gene involved in essential fungal-specific processes. such as sterol biosynthesis or fungal reproduction.

[0069] Embodiment 57: The isolated dsRNA of embodiment 56, wherein said dsRNA is capable of downregulating expression of one or more target genes selected from the group consisting of SEQ ID Nos: 85-86 and 97-98, and/or orthologs thereof.

[0070] Embodiment 58: The isolated dsRNA according to any one of embodiments 1-5, wherein said dsRNA inhibits or is capable of downregulating expression of a gene involved in sterol biosynthesis.

[0071] Embodiment 59: The isolated dsRNA of embodiment 58, wherein said dsRNA is capable of downregulating expression of one or more target genes selected from the group consisting of SEQ ID Nos: 85 and 178, and/or orthologs thereof.

[0072] Embodiment 60: The isolated dsRNA according to any one of embodiments 1-5, wherein said dsRNA inhibits or is capable of downregulating expression of a gene involved in fungal reproduction/compatibility.

[0073] Embodiment 61: The isolated dsRNA of embodiment 60, wherein said dsRNA is capable of downregulating expression of one or more target genes selected from the group consisting of SEQ ID Nos: 86 and 97, and/or orthologs thereof.

[0074] Embodiment 62: The isolated dsRNA according to any one of embodiments 1-5, wherein said dsRNA inhibits or is capable of downregulating expression of a gene involved in mitochondrial electron transport and ATP synthesis.

[0075] Embodiment 63: The isolated dsRNA of embodiment 62, said dsRNA is capable of downregulating expression of one or more target genes selected from the group consisting of SEQ ID Nos: 87-91 and 196, and/or orthologs thereof.

[0076] Embodiment 64: The isolated dsRNA according to any one of embodiments 1-5, wherein said dsRNA inhibits or is capable of downregulating expression of a gene involved in the alternative respiratory pathway.

[0077] Embodiment 65: The isolated dsRNA of embodiment 64, wherein said dsRNA is capable of downregulating expression of one or more target genes selected from the group consisting of SEQ ID Nos: 90-91, and/or orthologs thereof.

[0078] Embodiment 66: The isolated dsRNA according to any one of embodiments 1-5, wherein said dsRNA inhibits or is capable of downregulating expression of a gene involved in transcriptional regulation.

[0079] Embodiment 67: The isolated dsRNA of embodiment 66, wherein said dsRNA is capable of downregulating expression of one or more target genes selected from the group consisting of SEQ ID Nos:92-103 and 197, and/or orthologs thereof.

[0080] Embodiment 68: The isolated dsRNA according to any one of embodiments 1-5, wherein said dsRNA inhibits or is capable of downregulating expression of a gene involved in transcriptional regulation of stress.

[0081] Embodiment 69: The isolated dsRNA of embodiment 68, wherein said dsRNA is capable of downregulating expression of one or more target genes selected from the group consisting of SEQ ID Nos:92-93 and 197, and/or orthologs thereof.

[0082] Embodiment 70: The isolated dsRNA according to any one of embodiments 1-5, wherein said dsRNA inhibits or is capable of downregulating expression of a gene involved in transcriptional regulation of metabolism.

[0083] Embodiment 71: The isolated dsRNA of embodiment 70, wherein said dsRNA is capable of downregulating expression of one or more target genes selected from the group consisting of SEQ ID Nos:94-96, and/or orthologs thereof.

[0084] Embodiment 72: The isolated dsRNA according to any one of embodiments 1-5, wherein said dsRNA inhibits or is capable of downregulating expression of a gene involved in transcriptional regulation of development.

[0085] Embodiment 73: The isolated dsRNA of embodiment 72, wherein said dsRNA is capable of downregulating expression of one or more target genes selected from the group consisting of SEQ ID Nos:97-99, and/or orthologs thereof.

[0086] Embodiment 74: The isolated dsRNA according to any one of embodiments 1-5, wherein said dsRNA inhibits or is capable of downregulating expression of a gene involved in transcription and/or RNA-binding.

[0087] Embodiment 75: The isolated dsRNA of embodiment 74, wherein said dsRNA is capable of downregulating expression of one or more target genes selected from the group consisting of SEQ ID Nos: 100-103, and/or orthologs thereof.

[0088] Embodiment 76: The isolated dsRNA according to any one of embodiments 1-5, wherein said dsRNA inhibits or is capable of downregulating expression of a gene involved in translation.

[0089] Embodiment 77: The isolated dsRNA of embodiment 76, wherein said dsRNA is capable of downregulating expression of one or more target genes selected from the group consisting of SEQ ID Nos:104-109 and 198, and/or orthologs thereof.

[0090] Embodiment 78: The isolated dsRNA according to any one of embodiments 1-5, wherein said dsRNA inhibits or is capable of downregulating expression of a gene involved in protein modification and/or turnover.

[0091] Embodiment 79: The isolated dsRNA of embodiment 78, wherein said dsRNA is capable of downregulating expression of one or more target genes selected from the group consisting of SEQ ID No:110, and/or orthologs thereof.

[0092] Embodiment 80: The isolated dsRNA according to any one of embodiments 1-5, wherein said dsRNA inhibits or is capable of downregulating expression of a gene involved in protein localization and/or folding.

[0093] Embodiment 81: The isolated dsRNA of embodiment 80, wherein said dsRNA is capable of downregulating expression of one or more target genes selected from the group consisting of SEQ ID No:111-113, 141 and 202, and/or orthologs thereof.

[0094] Embodiment 82: The isolated dsRNA according to any one of embodiments 1-5, wherein said dsRNA inhibits or is capable of downregulating expression of a gene involved in signaling.

[0095] Embodiment 83: The isolated dsRNA of embodiment 82, wherein said dsRNA is capable of downregulating expression of one or more target genes selected from the group consisting of SEQ ID Nos:114-121, 148, and 205, and/or orthologs thereof.

[0096] Embodiment 84: The isolated dsRNA according to any one of embodiments 1-5, wherein said dsRNA inhibits or is capable of downregulating expression of a gene encoding a known or predicted secreted protein.

[0097] Embodiment 85: The isolated dsRNA of embodiment 84, wherein said dsRNA is capable of downregulating expression of one or more target genes selected from the group consisting of SEQ ID Nos:122-144, and 199-202, and/or orthologs thereof.

[0098] Embodiment 86: The isolated dsRNA according to any one of embodiments 1-5, wherein said dsRNA inhibits or is capable of downregulating expression of a gene encoding a known or predicted secreted protein associated with the TCP network.

[0099] Embodiment 87: The isolated dsRNA of embodiment 86, wherein said dsRNA is capable of downregulating expression of one or more target genes selected from the group consisting of SEQ ID Nos:122-139 and 199-200, and/or orthologs thereof.

[0100] Embodiment 88: The isolated dsRNA according to any one of embodiments 1-5, wherein, wherein said dsRNA inhibits or is capable of downregulating expression of a gene encoding a known or predicted secreted protein highly expressed during powdery mildew infection.

[0101] Embodiment 89: The isolated dsRNA of embodiment 88, wherein said dsRNA is capable of downregulating expression of one or more target genes selected from the group consisting of SEQ ID Nos:140-144 and 201-202, and/or orthologs thereof.

[0102] Embodiment 90: The isolated dsRNA according to any one of embodiments 1-5, wherein, wherein said dsRNA inhibits or is capable of downregulating expression of a gene predicted to be involved in plant hormone metabolism.

[0103] Embodiment 91: The isolated dsRNA of embodiment 90, wherein said dsRNA is capable of downregulating expression of one or more target genes selected from the group consisting of SEQ ID Nos:145-154 and 203-206, and/or orthologs thereof.

[0104] Embodiment 92: The isolated dsRNA according to any one of embodiments 1-5, wherein said dsRNA inhibits or is capable of downregulating expression of a gene predicted to be involved in carotenoid metabolism, including abscicic acid.

[0105] Embodiment 93: The isolated dsRNA of embodiment 92, wherein said dsRNA is capable of downregulating expression of one or more target genes selected from the group consisting of SEQ ID Nos:145-148 and 203-205, and/or orthologs thereof.

[0106] Embodiment 94: The isolated dsRNA according to any one of embodiments 1-5, wherein said dsRNA inhibits or is capable of downregulating expression of a gene predicted to be involved in oxylipin (e.g. jasmonic acid) metabolism, acquisition, or signaling.

[0107] Embodiment 95: The isolated dsRNA of embodiment 94, wherein said dsRNA is capable of downregulating expression of one or more target genes selected from the group consisting of SEQ ID Nos:149-151 and 206, and/or orthologs thereof.

[0108] Embodiment 96: The isolated dsRNA according to any one of embodiments 1-5, wherein said dsRNA inhibits or is capable of downregulating expression of a gene predicted to be involved chorismate and chorismate-derived plant hormone metabolism, including salicylic acid and auxin metabolism.

[0109] Embodiment 97: The isolated dsRNA of embodiment 96, wherein said dsRNA is capable of downregulating expression of one or more target genes selected from the group consisting of SEQ ID Nos:152-154, or orthologs thereof.

[0110] Embodiment 98: The isolated dsRNA according to any one of embodiments 1-5, wherein said dsRNA inhibits or is capable of downregulating expression of a gene involved in the cell cycle and/or DNA replication and repair.

[0111] Embodiment 99: The isolated dsRNA of embodiment 98, wherein said dsRNA is capable of downregulating expression of one or more target genes selected from the group consisting of SEQ ID Nos:155-163, 180, 207, and 211, or orthologs thereof.

[0112] Embodiment 100: The isolated dsRNA according to any one of embodiments 1-5, wherein said dsRNA inhibits or is capable of downregulating expression of a gene involved vesicles, and/or autophagy, and/or phagocytosis.

[0113] Embodiment 101: The isolated dsRNA of embodiment 100, wherein said dsRNA is capable of downregulating expression of one or more target genes selected from the group consisting of SEQ ID Nos:164-166 and 208, and/or orthologs thereof.

[0114] Embodiment 102: The isolated dsRNA according to any one of embodiments 1-5, wherein said dsRNA inhibits or is capable of downregulating expression of a gene involved in osmotic homoeostasis and/or metal/ion transport.

[0115] Embodiment 103: The isolated dsRNA of embodiment 102, wherein said dsRNA is capable of downregulating expression of one or more target genes selected from the group consisting of SEQ ID Nos:167-169 and 209-201, or orthologues thereof.

[0116] Embodiment 104: The isolated dsRNA according to any one of embodiments 1-5, wherein said dsRNA inhibits or is capable of downregulating expression of a gene involved in cell volume control.

[0117] Embodiment 105: The isolated dsRNA of embodiment 104, wherein said dsRNA is capable of downregulating expression of one or more target genes selected from the group consisting of SEQ ID Nos:167 and 209, and/or orthologues thereof.

[0118] Embodiment 106: The isolated dsRNA according to any one of embodiments 1-5, wherein, wherein said dsRNA inhibits or is capable of downregulating expression of a gene involved in metal/ion transport.

[0119] Embodiment 107: The isolated dsRNA of embodiment 106, wherein said dsRNA is capable of downregulating expression of one or more target genes selected from the group consisting of SEQ ID Nos:168-169 and 210, or orthologues thereof.

[0120] Embodiment 108: The isolated dsRNA according to any one of embodiments 1-5, wherein, wherein said dsRNA inhibits or is capable of downregulating expression of a gene identified as a single copy gene following whole genome duplication in G. orontii MGH1.

[0121] Embodiment 109: The isolated dsRNA of embodiment 108, wherein said dsRNA is capable of downregulating expression of one or more target genes selected from the group consisting of SEQ ID Nos:255-411.

[0122] Embodiment 110: The isolated dsRNA of embodiment 108, wherein said dsRNA is capable of downregulating expression of one or more target genes selected from the group consisting of SEQ ID Nos: 15, 40, 51, 54, 58, 59-61, 63-66, 68, 70, 72, 78, 83, 87, 88, 93, 98-99, 104-113, 145, 154-180 and 185, 191-193, 196, 198, 207-211, and/or orthologs thereof.

[0123] Embodiment 111: The isolated dsRNA of embodiment 108, wherein said dsRNA is capable of downregulating expression of one or more target genes selected from the group consisting of SEQ ID Nos:170-179, and/or orthologs thereof.

[0124] Embodiment 112: The isolated dsRNA of embodiment 108, wherein said dsRNA is capable of downregulating expression of one or more target genes selected from the group consisting of SEQ ID Nos:15, 63-64, 70, 87, 104, 145, 164, 167, 169, 179, and 180, and/or orthologs thereof.

[0125] Embodiment 113: The isolated dsRNA according to any one of embodiments 1-5, wherein said dsRNA inhibits or is capable of downregulating expression of a gene identified as interacting with the TCP network.

[0126] Embodiment 114: The isolated dsRNA of embodiment 113, wherein said dsRNA is capable of downregulating expression of one or more target genes selected from the group consisting of SEQ ID Nos:103, 122-139, 163 and 199-200, and/or orthologs thereof.

[0127] Embodiment 115: The isolated dsRNA according to any one of embodiments 1-5, wherein said dsRNA inhibits or is capable of downregulating expression of a gene involved in carbohydrate metabolism.

[0128] Embodiment 116: The composition according to any one of embodiment 115, wherein said dsRNA is capable of downregulating expression of one or more target genes selected from the group consisting of SEQ ID Nos:52-61, and/or orthologs thereof.

[0129] Embodiment 117: The isolated dsRNA according to any one of embodiments 1-5, wherein said dsRNA inhibits or is capable of downregulating expression of a gene involved in amino acid and/or nucleotide metabolism and/or salvage.

[0130] Embodiment 118: The composition according to any one of embodiment 117, wherein said dsRNA is capable of downregulating expression of one or more target genes selected from the group consisting of SEQ ID Nos:62-84, and/or orthologs thereof.

[0131] Embodiment 119: The isolated dsRNA according to any one of embodiments 1-5, wherein said dsRNA inhibits or is capable of downregulating expression of a gene involved in an essential fungal process such as sterol biosynthesis or fungal sexual reproduction.

[0132] Embodiment 120: The composition according to any one of embodiment 119, wherein said dsRNA is capable of downregulating expression of one or more target genes selected from the group consisting of SEQ ID Nos:85-86, and/or orthologs thereof.

[0133] Embodiment 121: The isolated dsRNA according to any one of embodiments 1-5, wherein said dsRNA inhibits or is capable of downregulating expression of a gene involved in mitochondrial electron transport.

[0134] Embodiment 122: The composition according to any one of embodiment 121, wherein said dsRNA is capable of downregulating expression of one or more target genes selected from the group consisting of SEQ ID Nos:87-91, and/or orthologs thereof.

[0135] Embodiment 123: The isolated dsRNA according to any one of embodiments 1-5, wherein said dsRNA inhibits or is capable of downregulating expression of a gene involved in transcriptional regulation.

[0136] Embodiment 124: The composition according to any one of embodiment 123, wherein said dsRNA is capable of downregulating expression of one or more target genes selected from the group consisting of SEQ ID Nos:92-103, and/or orthologs thereof.

[0137] Embodiment 125: The isolated dsRNA according to any one of embodiments 1-5, wherein said dsRNA inhibits or is capable of downregulating expression of a gene involved in translation.

[0138] Embodiment 126: The composition according to any one of embodiment 125, wherein said dsRNA is capable of downregulating expression of one or more target genes selected from the group consisting of SEQ ID Nos:104-113, and/or orthologs thereof.

[0139] Embodiment 127: The isolated dsRNA according to any one of embodiments 1-5, wherein said dsRNA inhibits or is capable of downregulating expression of a gene involved in signaling.

[0140] Embodiment 128: The composition according to any one of embodiment 127, wherein said dsRNA is capable of downregulating expression of one or more target genes selected from the group consisting of SEQ ID Nos:114-121, and/or orthologs thereof.

[0141] Embodiment 129: The isolated dsRNA according to any one of embodiments 1-5, wherein said dsRNA inhibits or is capable of downregulating expression of a gene involved protein secretion.

[0142] Embodiment 130: The composition according to any one of embodiment 129, wherein said dsRNA is capable of downregulating expression of one or more target genes selected from the group consisting of SEQ ID Nos:122-144, and/or orthologs thereof.

[0143] Embodiment 131: The isolated dsRNA according to any one of embodiments 1-130, wherein said dsRNA inhibits or is capable of downregulating expression of a gene involved plant hormone metabolism.

[0144] Embodiment 132: The composition according to any one of embodiment 131, wherein said dsRNA is capable of downregulating expression of one or more target genes selected from the group consisting of SEQ ID Nos:145-154, and/or orthologs thereof.

[0145] Embodiment 133: The isolated dsRNA according to any one of embodiments 1-5, wherein said dsRNA inhibits or is capable of downregulating expression of a gene involved cell cycle and/or DNA replication.

[0146] Embodiment 134: The composition according to any one of embodiment 133, wherein said dsRNA is capable of downregulating expression of one or more target genes selected from the group consisting of SEQ ID Nos:155-163, and/or orthologs thereof.

[0147] Embodiment 135: The isolated dsRNA according to any one of embodiments 1-5, wherein said dsRNA inhibits or is capable of downregulating expression of a gene involved vesicles, and/or autophagy, and/or phagocytosis.

[0148] Embodiment 136: The composition according to any one of embodiment 135, wherein said dsRNA is capable of downregulating expression of one or more target genes selected from the group consisting of SEQ ID Nos:164-166, and/or orthologs thereof.

[0149] Embodiment 137: The isolated dsRNA according to any one of embodiments 1-5, wherein said dsRNA inhibits or is capable of downregulating expression of a gene involved in cell volume control and/or metal ion transport.

[0150] Embodiment 138: The composition according to any one of embodiment 137, wherein said dsRNA is capable of downregulating expression of one or more target genes selected from the group consisting of SEQ ID Nos:167-169, and/or orthologs thereof.

[0151] Embodiment 139: The isolated dsRNA according to any one of embodiments 1-5, wherein said dsRNA is capable of downregulating expression of one or more target genes selected from the group consisting of SEQ ID Nos:170-178, and/or orthologs thereof.

[0152] Embodiment 140: The isolated dsRNA according to any one of embodiment 1, wherein said dsRNA inhibits or is capable of downregulating (e.g., downregulates) expression of one or more target genes selected from the group consisting of G. orontii lipase A, G. orontii lipase 1, G. orontii transaldolase, G. orontii isocitrate lyase, G. orontii malate synthase, G. orontii citrate (Si) synthase, alanine-glyoxylate aminotransferase, and G. orontii trans-2-enoyl-CoA reductase, and/or an ortholog thereof.

[0153] Embodiment 141: The isolated dsRNA of embodiment 1, wherein said target gene is selected from the group consisting of G. orontii glutamate dehydrogenase, G. orontii threonine aldolase, G. orontii Ketopantoate hydroxymethyltransferase (KPHMT), G. orontii tetrahydrofolate synthase, and G. orontii thymidylate synthase, and/or an ortholog thereof.

[0154] Embodiment 142: The isolated dsRNA of embodiment 1, wherein said target gene is selected from the group consisting of pf08238-Sel1 repeat (SEQ NO. 87,196), and/or an ortholog thereof.

[0155] Embodiment 143: The isolated dsRNA of embodiment 1 wherein said target gene is selected from the group consisting of G. orontii apotosis antagonizing transcription factor (AATF) and G. orontii nuclear fragile X mental retardation interacting protein 1 (NUFIP1), and/or an ortholog thereof.

[0156] Embodiment 144: The isolated dsRNA of embodiment 1, wherein said target gene is selected from the group consisting of G. orontii OEC60/61, G. orontii OEC70, and G. orontii OEC14, and/or an ortholog thereof.

[0157] Embodiment 145: The isolated dsRNA of embodiment 1, wherein said target gene is selected from the group consisting of G. orontii effector candidate 2 (EC2) and G. orontii HSP70 family, and/or an ortholog thereof.

[0158] Embodiment 146: The isolated dsRNA of embodiment 1, wherein said target gene is selected from the group consisting of G. orontii β-carotene 15,15′-dioxygenase (BCDO), G. orontii xanthoxin oxidase, G. orontii ABA G-coupled receptor and G. orontii acyl-CoA oxidase, and/or an ortholog thereof.

[0159] Embodiment 147: The isolated dsRNA according to any one of embodiments 1-5, wherein said target gene is selected from the group consisting of G. orontii β-carotene 15,15′-dioxygenase (BCDO), G. orontii xanthoxin oxidase, and G. orontii ABAR, and/or an ortholog thereof.

[0160] Embodiment 148: The isolated dsRNA according to any one of embodiments 1-5, wherein said dsRNA is capable of downregulating (e.g., downregulates) expression of one or more target G. orontii genes selected from the group consisting of Cytochrome P450 monoxygenase (CYP51) (SEQ ID NO:85), TAG lipase 1, caroboxyesterase domain (SEQ ID NO:1), TAG lipase A, extracellular lipase (SEQ ID NO:2), Transaldolase (SEQ ID NO:15), Isocitrate lyase (ICL) (SEQ ID NO:20), Malate synthase (MS) (SEQ ID NO:21), Citrate (Si) synthase (SEQ ID NO:22), Trans-2-enoyl CoA reductase (SEQ ID NO:32), Glutamate dehydrogenase (SEQ ID NO:63), Threonine aldolase (SEQ ID NO:64), Pf02548—Ketopantoate hydroxymethyltransferase (SEQ ID NO:70), Tetrahydrofolate synthase (SEQ ID NO:71), Thymidine synthase (SEQ ID NO:79), Pf8238-Sel1 repeat (SEQ ID NO:87), Apoptosis antagonizing transcription factor (AATF) (SEQ ID NO:92), Pf10453—Nuclear fragile X mental retardation-interacting protein 1 (NUFIP1) (SEQ ID NO:104), G. orontii effector candidate 60/61 (SEQ ID NO:122), G. orontii effector candidate 70 (SEQ ID NO:123), G. orontii effector candidate 14 (SEQ ID NO:124), Effector protein EC2 (SEQ ID NO:140), Heat shock protein 70 family (HSP70) (SEQ ID NO:141), β-carotene 15,15′-dioxygenase (BCDO) (SEQ ID NO:145), Xanthin oxidase (SEQ ID NO:146), Acyl-CoA oxidase (ACX_(SEQ ID NO:149), and Pf04109—Autophagy protein Apg9 (SEQ ID NO:164), or an ortholog thereof where said ortholog is found in other species of phytopathogen.

[0161] Embodiment 149: The composition according to any one of embodiment 1, wherein said target gene is selected from the group consisting of an ortholog of a gene selected from the group consisting of G. orontii lipase a, G. orontii lipase 1, G. orontii (3-carotene 15,15′-dioxygenase, G. orontii apoptosis-antagonizing transcription factor (AATF), effector candidate 2, OEC14, OEC60/OEC61, and OEC70.

[0162] Embodiment 150: The composition according to any one of embodiment 1, wherein said target gene is selected from the group consisting of an ortholog of a gene selected from the group consisting of TAG lipase 1, caroboxyesterase domain (SEQ ID NO:1), TAG lipase A, extracellular lipase (SEQ ID NO:2), Transaldolase (SEQ ID NO:15), Isocitrate lyase (ICL) (SEQ ID NO:20), Malate synthase (MS) (SEQ ID NO:21), Citrate (Si) synthase (SEQ ID NO:22), Trans-2-enoyl CoA reductase (SEQ ID NO:32), Glutamate dehydrogenase (SEQ ID NO:63), Threonine aldolase (SEQ ID NO:64), Pf02548-Ketopantoate hydroxymethyltransferase (SEQ ID NO:70), Tetrahydrofolate synthase (SEQ ID NO:71), Thymidine synthase (SEQ ID NO:79), Pf8238-Sel1 repeat (SEQ ID NO:87), Apoptosis antagonizing transcription factor (AATF) (SEQ ID NO:92), Pf10453—Nuclear fragile X mental retardation-interacting protein 1 (NUFIP1) (SEQ ID NO:104), G. orontii effector candidate 60/61 (SEQ ID NO:122), G. orontii effector candidate 70 (SEQ ID NO:123), G. orontii effector candidate 14 (SEQ ID NO:124), Effector protein EC2 (SEQ ID NO:140), Heat shock protein 70 family (HSP70) (SEQ ID NO:141), β-carotene 15,15′-dioxygenase (BCDO) (SEQ ID NO:145), Xanthin oxidase (SEQ ID NO:146), Acyl-CoA oxidase (ACX_(SEQ ID NO:149), and Pf04109—Autophagy protein Apg9 (SEQ ID NO:164).

[0163] Embodiment 151: The composition according to any one of embodiments 1-5, wherein said target gene is selected from the group consisting of an ortholog of a gene selected from the group consisting of MS (SEQ ID NO:21), ICL1 (SEQ ID NO:20), ICL2 (SEQ ID NO:20), LIP1 (SEQ ID NO:1), LIPA (SEQ ID NO:2), BCDO (SEQ ID NO:145), ACX (SEQ ID NO:149), AATF (SEQ ID NO:92), EC2 (SEQ ID NO:140), OEC60/OEC61 (SEQ ID NO:122), OEC70 (SEQ ID NO:123), and OEC14 (SEQ ID NO:124).

[0164] Embodiment 152: The isolated dsRNA of embodiment 151, wherein said target gene is an orgolog of G. orontii target gene MS (SEQ ID NO:21).

[0165] Embodiment 153: The composition according to any one of embodiment 151, wherein said target gene is an orgolog of G. orontii target gene ICL1 (SEQ ID NO:20).

[0166] Embodiment 154: The composition according to any one of embodiment 151, wherein said target gene is an orgolog of G. orontii target gene ICL2 (SEQ ID NO:20).

[0167] Embodiment 155: The composition according to any one of embodiment 151, wherein said target gene is an orgolog of G. orontii target gene LIP1 (SEQ ID NO:1).

[0168] Embodiment 156: The composition according to any one of embodiment 151, wherein said target gene is an orgolog of G. orontii target gene LIPA (SEQ ID NO:2).

[0169] Embodiment 157: The composition according to any one of embodiment 151, wherein said target gene is an orgolog of G. orontii target gene BCDO (SEQ ID NO:145).

[0170] Embodiment 158: The composition according to any one of embodiment 151, wherein said target gene is an orgolog of G. orontii target gene ACX (SEQ ID NO:149).

[0171] Embodiment 159: The composition according to any one of embodiment 151, wherein said target gene is an orgolog of G. orontii target gene AATF (SEQ ID NO:92).

[0172] Embodiment 160: The composition according to any one of embodiment 151, wherein said target gene is an orgolog of G. orontii target gene EC2 (SEQ ID NO:140).

[0173] Embodiment 161: The composition according to any one of embodiment 151, wherein said target gene is an orgolog of G. orontii target gene OEC60/OEC61 (SEQ ID NO:122).

[0174] Embodiment 162: The composition according to any one of embodiment 151, wherein said target gene is an orgolog of G. orontii target gene OEC70 (SEQ ID NO:123).

[0175] Embodiment 163: The composition according to any one of embodiment 151, wherein said target gene is an orgolog of G. orontii target gene OEC14 (SEQ ID NO:124).

[0176] Embodiment 164: The isolated dsRNA according to any one of embodiments 1-163, wherein said target gene is an ortholog of one of said G. orontii genes.

[0177] Embodiment 165: The isolated dsRNA according to any one of embodiments 1-3, wherein said target genes and/or orthologs comprise the target gene of SEQ ID NO:1, and/or an ortholog thereof.

[0178] Embodiment 166: The isolated dsRNA of embodiment 165, wherein said target genes and/or orthologs comprise the target gene of SEQ ID NO:2, and/or an ortholog thereof.

[0179] Embodiment 167: The isolated dsRNA according to any one of embodiments 165-166, wherein said target genes and/or orthologs comprise the target gene of SEQ ID NO:15, and/or an ortholog thereof.

[0180] Embodiment 168: The isolated dsRNA according to any one of embodiments 165-167, wherein said target genes and/or orthologs comprise the target gene of SEQ ID NO:20, and/or an ortholog thereof.

[0181] Embodiment 169: The isolated dsRNA according to any one of embodiments 165-168, wherein said target genes and/or orthologs comprise the target gene of SEQ ID NO:21, and/or an ortholog thereof.

[0182] Embodiment 170: The isolated dsRNA according to any one of embodiments 165-169, wherein said target genes and/or orthologs comprise the target gene of SEQ ID NO:22, and/or an ortholog thereof.

[0183] Embodiment 171: The isolated dsRNA according to any one of embodiments 165-170, wherein said target genes and/or orthologs comprise the target gene of SEQ ID NO:32, and/or an ortholog thereof.

[0184] Embodiment 172: The isolated dsRNA according to any one of embodiments 165-171, wherein said target genes and/or orthologs comprise the target gene of SEQ ID NO:63, and/or an ortholog thereof.

[0185] Embodiment 173: The isolated dsRNA according to any one of embodiments 165-172, wherein said target genes and/or orthologs comprise the target gene of SEQ ID NO:64, and/or an ortholog thereof.

[0186] Embodiment 174: The isolated dsRNA according to any one of embodiments 165-173, wherein said target genes and/or orthologs comprise the target gene of SEQ ID NO:70, and/or an ortholog thereof.

[0187] Embodiment 175: The isolated dsRNA according to any one of embodiments 165-174, wherein said target genes and/or orthologs comprise the target gene of SEQ ID NO:71, and/or an ortholog thereof.

[0188] Embodiment 176: The isolated dsRNA according to any one of embodiments 165-175, wherein said target genes and/or orthologs comprise the target gene of SEQ ID NO:79, and/or an ortholog thereof.

[0189] Embodiment 177: The isolated dsRNA according to any one of embodiments 165-176, wherein said target genes and/or orthologs comprise the target gene of SEQ ID NO:87, and/or an ortholog thereof.

[0190] Embodiment 178: The isolated dsRNA according to any one of embodiments 165-177, wherein said target genes and/or orthologs comprise the target gene of SEQ ID NO:92, and/or an ortholog thereof.

[0191] Embodiment 179: The isolated dsRNA according to any one of embodiments 165-178, wherein said target genes and/or orthologs comprise the target gene of SEQ ID NO:104, and/or an ortholog thereof.

[0192] Embodiment 180: The isolated dsRNA according to any one of embodiments 165-179, wherein said target genes and/or orthologs comprise the target gene of SEQ ID NO:122, and/or an ortholog thereof.

[0193] Embodiment 181: The isolated dsRNA according to any one of embodiments 165-180, wherein said target genes and/or orthologs comprise the target gene of SEQ ID NO:123, and/or an ortholog thereof.

[0194] Embodiment 182: The isolated dsRNA according to any one of embodiments 165-181, wherein said target genes and/or orthologs comprise the target gene of SEQ ID NO:124, and/or an ortholog thereof.

[0195] Embodiment 183: The isolated dsRNA according to any one of embodiments 165-182, wherein said target genes and/or orthologs comprise the target gene of SEQ ID NO:140, and/or an ortholog thereof.

[0196] Embodiment 184: The isolated dsRNA according to any one of embodiments 165-183, wherein said target genes and/or orthologs comprise the target gene of SEQ ID NO:141, and/or an ortholog thereof.

[0197] Embodiment 185: The isolated dsRNA according to any one of embodiments 165-184, wherein said target genes and/or orthologs comprise the target gene of SEQ ID NO:145, and/or an ortholog thereof.

[0198] Embodiment 186: The isolated dsRNA according to any one of embodiments 165-185, wherein said target genes and/or orthologs comprise the target gene of SEQ ID NO:145, and/or an ortholog thereof.

[0199] Embodiment 187: The isolated dsRNA according to any one of embodiments 165-186, wherein said target genes and/or orthologs comprise the target gene of SEQ ID NO:146, and/or an ortholog thereof.

[0200] Embodiment 188: The isolated dsRNA according to any one of embodiments 165-187, wherein said target genes and/or orthologs comprise the target gene of SEQ ID NO:148, and/or an ortholog thereof.

[0201] Embodiment 189: The isolated dsRNA according to any one of embodiments 165-188, wherein said target genes and/or orthologs comprise the target gene of SEQ ID NO:149, and/or an ortholog thereof.

[0202] Embodiment 190: The isolated dsRNA according to any one of embodiments 165-189, wherein said target genes and/or orthologs comprise the target gene of SEQ ID NO:163, and/or an ortholog thereof.

[0203] Embodiment 191: The isolated dsRNA according to any one of embodiments 165-190, wherein said target genes and/or orthologs comprise the target gene of SEQ ID NO:164, and/or an ortholog thereof.

[0204] Embodiment 192: The isolated dsRNA according to any one of embodiments 165-191, wherein said target genes and/or orthologs comprise the target gene of SEQ ID NO:167, and/or an ortholog thereof.

[0205] Embodiment 193: The isolated dsRNA according to any one of embodiments 165-192, wherein said target genes and/or orthologs comprise the target gene of SEQ ID NO:169, and/or an ortholog thereof.

[0206] Embodiment 194: The isolated dsRNA according to any one of embodiments 165-193, wherein said target genes and/or orthologs comprise the target gene of SEQ ID NO:179, and/or an ortholog thereof.

[0207] Embodiment 195: The isolated dsRNA according to any one of embodiments 165-194, wherein said target genes and/or orthologs comprise the target gene of SEQ ID NO:180, and/or an ortholog thereof.

[0208] Embodiment 196: The isolated dsRNA according to any one of embodiments 165-195, wherein said target genes and/or orthologs comprise the target gene of SEQ ID NO:181, and/or an ortholog thereof.

[0209] Embodiment 197: The isolated dsRNA according to any one of embodiments 165-196, wherein said target genes and/or orthologs comprise the target gene of SEQ ID NO:182, and/or an ortholog thereof.

[0210] Embodiment 198: The isolated dsRNA according to any one of embodiments 165-197, wherein said target genes and/or orthologs comprise the target gene of SEQ ID NO:183, and/or an ortholog thereof.

[0211] Embodiment 199: The isolated dsRNA according to any one of embodiments 165-198, wherein said target genes and/or orthologs comprise the target gene of SEQ ID NO:184, and/or an ortholog thereof.

[0212] Embodiment 200: The isolated dsRNA according to any one of embodiments 165-199, wherein said target genes and/or orthologs comprise the target gene of SEQ ID NO:185, and/or an ortholog thereof.

[0213] Embodiment 201: The isolated dsRNA according to any one of embodiments 165-200, wherein said target genes and/or orthologs comprise the target gene of SEQ ID NO:186, and/or an ortholog thereof.

[0214] Embodiment 202: The isolated dsRNA according to any one of embodiments 165-201, wherein said target genes and/or orthologs comprise the target gene of SEQ ID NO:187, and/or an ortholog thereof.

[0215] Embodiment 203: The isolated dsRNA according to any one of embodiments 165-202, wherein said target genes and/or orthologs comprise the target gene of SEQ ID NO:188, and/or an ortholog thereof.

[0216] Embodiment 204: The isolated dsRNA according to any one of embodiments 165-203, wherein said target genes and/or orthologs comprise the target gene of SEQ ID NO:189, and/or an ortholog thereof.

[0217] Embodiment 205: The isolated dsRNA according to any one of embodiments 165-204, wherein said target genes and/or orthologs comprise the target gene of SEQ ID NO:190, and/or an ortholog thereof.

[0218] Embodiment 206: The isolated dsRNA according to any one of embodiments 165-205, wherein said target genes and/or orthologs comprise the target gene of SEQ ID NO:191, and/or an ortholog thereof.

[0219] Embodiment 207: The isolated dsRNA according to any one of embodiments 165-206, wherein said target genes and/or orthologs comprise the target gene of SEQ ID NO:192, and/or an ortholog thereof.

[0220] Embodiment 208: The isolated dsRNA according to any one of embodiments 165-207, wherein said target genes and/or orthologs comprise the target gene of SEQ ID NO:193, and/or an ortholog thereof.

[0221] Embodiment 209: The isolated dsRNA according to any one of embodiments 165-208, wherein said target genes and/or orthologs comprise the target gene of SEQ ID NO:194, and/or an ortholog thereof.

[0222] Embodiment 210: The isolated dsRNA according to any one of embodiments 165-209, wherein said target genes and/or orthologs comprise the target gene of SEQ ID NO:195, and/or an ortholog thereof.

[0223] Embodiment 211: The isolated dsRNA according to any one of embodiments 165-210, wherein said target genes and/or orthologs comprise the target gene of SEQ ID NO:196, and/or an ortholog thereof.

[0224] Embodiment 212: The isolated dsRNA according to any one of embodiments 165-211, wherein said target genes and/or orthologs comprise the target gene of SEQ ID NO:197, and/or an ortholog thereof.

[0225] Embodiment 213: The isolated dsRNA according to any one of embodiments 165-212, wherein said target genes and/or orthologs comprise the target gene of SEQ ID NO:198, and/or an ortholog thereof.

[0226] Embodiment 214: The isolated dsRNA according to any one of embodiments 165-213, wherein said target genes and/or orthologs comprise the target gene of SEQ ID NO:199, and/or an ortholog thereof.

[0227] Embodiment 215: The isolated dsRNA according to any one of embodiments 165-214, wherein said target genes and/or orthologs comprise the target gene of SEQ ID NO:200, and/or an ortholog thereof.

[0228] Embodiment 216: The isolated dsRNA according to any one of embodiments 165-215, wherein said target genes and/or orthologs comprise the target gene of SEQ ID NO:201, and/or an ortholog thereof.

[0229] Embodiment 217: The isolated dsRNA according to any one of embodiments 165-216, wherein said target genes and/or orthologs comprise the target gene of SEQ ID NO:202, and/or an ortholog thereof.

[0230] Embodiment 218: The isolated dsRNA according to any one of embodiments 165-217, wherein said target genes and/or orthologs comprise the target gene of SEQ ID NO:203, and/or an ortholog thereof.

[0231] Embodiment 219: The isolated dsRNA according to any one of embodiments 165-218, wherein said target genes and/or orthologs comprise the target gene of SEQ ID NO:204, and/or an ortholog thereof.

[0232] Embodiment 220: The isolated dsRNA according to any one of embodiments 165-219, wherein said target genes and/or orthologs comprise the target gene of SEQ ID NO:205, and/or an ortholog thereof.

[0233] Embodiment 221: The isolated dsRNA according to any one of embodiments 165-220, wherein said target genes and/or orthologs comprise the target gene of SEQ ID NO:206, and/or an ortholog thereof.

[0234] Embodiment 222: The isolated dsRNA according to any one of embodiments 165-221, wherein said target genes and/or orthologs comprise the target gene of SEQ ID NO:207, and/or an ortholog thereof.

[0235] Embodiment 223: The isolated dsRNA according to any one of embodiments 165-222, wherein said target genes and/or orthologs comprise the target gene of SEQ ID NO:208, and/or an ortholog thereof.

[0236] Embodiment 224: The isolated dsRNA according to any one of embodiments 165-223, wherein said target genes and/or orthologs comprise the target gene of SEQ ID NO:209, and/or an ortholog thereof.

[0237] Embodiment 225: The isolated dsRNA according to any one of embodiments 165-224, wherein said target genes and/or orthologs comprise the target gene of SEQ ID NO:210, and/or an ortholog thereof.

[0238] Embodiment 226: The isolated dsRNA according to any one of embodiments 165-225, wherein said target genes and/or orthologs comprise the target gene of SEQ ID NO:211, and/or an ortholog thereof.

[0239] Embodiment 227: The isolated dsRNA according to any one of embodiments 165-226, wherein said target genes and/or orthologs comprise the target gene of SEQ ID NO:85, and/or an ortholog thereof.

[0240] Embodiment 228: The isolated dsRNA according to any one of embodiments 1-227, wherein said dsRNA inhibits or is capable of downregulating expression of orthologs of said one or more target where said orthologs are found in species of phytopathogen other than the species shown in Table 1 (G. orontii).

[0241] Embodiment 229: The isolated dsRNA according to any one of embodiments 1-228, wherein said dsRNA inhibits or is capable of downregulating expression of orthologs said one or more target genes where said orthologs are found in species of phytopathogen other than the species shown in Table 1 and Table 2 (G. orontii and E. necator).

[0242] Embodiment 230: The isolated dsRNA according to any one of embodiments 1-227, wherein said dsRNA inhibits or is capable of downregulating expression of said one or more target genes.

[0243] Embodiment 231: The isolated dsRNA according to any one of embodiments 1-230, wherein said ortholog is an ortholog found in an obligate biotroph.

[0244] Embodiment 232: The isolated dsRNA according to any one of embodiments 1-230, wherein said ortholog is an ortholog found in a powdery mildew.

[0245] Embodiment 233: The isolated dsRNA of embodiment 232, wherein said ortholog is an ortholog found in a powdery mildew selected from the powdery mildew genus Golovinomyces including G. orontii and G. cichorachearum (of curcubits), Erysiphe including E. necator (or Uncinula necator) (powdery mildew of grapes), Blumeria including B. graminis f. sp. tritici (causes powdery mildew of wheat), f. sp. hordei (powdery mildew of barley), Microsphaera including M. diffusa (powdery mildew of legumes, e.g. soybean), Leveillula including L. taurica (also known as Oidiopsis taurica) (powdery mildew of onion or artichoke), Podosphaera including P. leucotricha (powdery mildew of apples and pears), P. macularis (powdery mildew of hemp and cannabis), P. xanthii (powdery mildew of cucurbits: cucumbers, squashes (including pumpkins), luffas, melons, and watermelons), and P. pannosa (powdery mildew of roses).

[0246] Embodiment 234: The isolated dsRNA of embodiment 232, wherein said ortholog is an ortholog found in a powdery mildew selected from the powdery mildew genus Golovinomyces including G. orontii and G. cichorachearum (of curcubits), Erysiphe including E. necator (or Uncinula necator) (powdery mildew of grapes), Microsphaera including M. diffusa (powdery mildew of legumes, e.g. soybean), Leveillula including L. taurica (also known as Oidiopsis taurica) (powdery mildew of onion or artichoke), Oidium including O. neolycopersici (powdery mildew of tomato), Podosphaera including P. leucotricha (powdery mildew of apples and pears), P. macularis (powdery mildew of hemp and cannabis), P. xanthii (powdery mildew of cucurbits: cucumbers, squashes (including pumpkins), luffas, melons, and watermelons), and P. pannosa (also known as Sphaerotheca pannosa, powdery mildew of roses).

[0247] Embodiment 235: The isolated dsRNA of embodiment 232, wherein said ortholog is an ortholog found in a powdery mildew selected from the group consisting of Erysiphe necator (or Uncinula necator) (powdery mildew of grapes), Erysiphe pisi (powdery mildew of pea), Blumeria graminis f. sp. tritici (causes powdery mildew of wheat), f. sp. hordei (powdery mildew of barley), f. sp. avenae (powdery mildew of oats), f. sp. secalis (powdery mildew of rye), Microsphaera diffusa (powdery mildew of legumes, e.g. soybean), Leveillula taurica (also known as Oidiopsis taurica) (powdery mildew of onion or artichoke), Oidium neolycopersici (powdery mildew of tomato), Podosphaera leucotricha (powdery mildew of apples and pears), Podosphaera macularis (powdery mildew of hops, hemp and cannabis), Podosphaera aphanis (powdery mildew of strawberry), Podosphaera fusca and Podosphaera xanthii (powdery mildew of cucurbits: cucumbers, squashes (including pumpkins), luffas, melons, and watermelons), Podosphaera pannosa (powdery mildew of roses), and G. cichoracearum, G. orontii, G. ambrosiae, G. spadiceus (powdery mildews of cucurbits, cannabis, hemp and sunflower).

[0248] Embodiment 236: The isolated dsRNA of embodiment 232, wherein said ortholog is an ortholog found in a powdery mildew selected from the group consisting of Erysiphe necator (or Uncinula necator) (powdery mildew of grapes), Blumeria graminis f sp. tritici (causes powdery mildew of wheat), f. sp. hordei (powdery mildew of barley), Microsphaera diffusa (powdery mildew of legumes, e.g. soybean), Leveillula taurica (also known as Oidiopsis taurica) (powdery mildew of onion or artichoke), Podosphaera leucotricha (powdery mildew of apples and pears), and Podosphaera xanthii (powdery mildew of cucurbits: cucumbers, squashes (including pumpkins), luffas, melons, and watermelons).

[0249] Embodiment 237: The isolated dsRNA of embodiment 232, wherein said ortholog is an ortholog found in Erysiphe necator (or Uncinula necator).

[0250] Embodiment 238: The isolated dsRNA according to any one of embodiments 1-230, wherein said ortholog is an ortholog found in a plant rust.

[0251] Embodiment 239: The composition according to any one of embodiment of embodiment 238, wherein said ortholog is an ortholog found in a plant rust selected from the group consisting of Cronartium ribicola (White pine blister rust), Gymnosporangium juniperi-virginianae (Cedar-apple rust), Hemileia vastatrix (Coffee rust), Phakopsora meibomiae and P. pachyrhizi (Soybean rust), Puccinia coronata (Crown Rust of Oats and Ryegrass), Puccinia graminis (Stem rust of wheat and Kentucky bluegrass, or black rust of cereals), Puccinia hemerocallidis (Daylily rust), Puccinia triticina (Brown Wheat Rust), Puccinia sorghi (Common Rust of Corn), Puccinia striiformis (Yellow Rust) of cereals, Uromyces appendiculatus (Bean Rust), Puccinia melanocephala (Brown Rust of Sugarcane), and Puccinia kuehnii (Orange rust of Sugar cane).

[0252] Embodiment 240: The isolated dsRNA according to any one of embodiments 1-230, wherein said ortholog is an ortholog found in an ascomycete selected from the group consisting of Botrytis sp. (grey mold), Fusarium spp. (Fusarium wilt disease), Thielaviopsis spp. (canker rot, black root rot, Thielaviopsis root rot), Verticillium spp., Magnaporthe grisea (rice blast), and Sclerotinia sclerotiorum (cottony rot).

[0253] Embodiment 241: The isolated dsRNA according to any one of embodiments 1-230, wherein said ortholog is an ortholog found in a Basidiomycete selected from the group consisting of Ustilago spp. (smuts) smut of cereals, Tilletia sp. Rhizoctonia spp., and Armillaria spp. (honey fungus species, virulent pathogens of trees).

[0254] Embodiment 242: The isolated dsRNA according to any one of embodiments 1-241, wherein said target gene is not Cytochrome P450 monoxygenase (CYP51) or an ortholog thereof.

[0255] Embodiment 243: The isolated dsRNA according to any one of embodiments 1-242, wherein said ortholog shares at least 35% sequence identity, or at least 40% sequence identity, or at least 50% sequence identity, or at least 80% sequence identity, or at least 85% sequence identity, or at least 90% sequence identity, or at least 95% sequence identity with the corresponding G. orontii gene.

[0256] Embodiment 244: The isolated dsRNA according to any one of embodiments 1-243, wherein said ortholog shares at least 50% sequence identity, or at least 60% sequence identity, or at least 70% sequence identity, or at least 80% sequence identity, or at least 85% sequence identity, or at least 90% sequence identity, or at least 95% sequence identity with the corresponding G. orontii gene.

[0257] Embodiment 245: The isolated dsRNA according to any one of embodiments 1-244, wherein said ortholog encodes a protein that shares at least 35% sequence identity, or at least 40% sequence identity, or at least 50% sequence identity, or at least 80% sequence identity, or at least 85% sequence identity, or at least 90% sequence identity, or at least 95% sequence identity or at least 98% sequence identity with a protein expressed by the corresponding G. orontii gene.

[0258] Embodiment 246: The isolated dsRNA according to any one of embodiments 1-245, wherein said ortholog shares at least 50% sequence identity, or at least 60% sequence identity, or at least 70% sequence identity, or at least 80% sequence identity, or at least 85% sequence identity, or at least 90% sequence identity, or at least 95% sequence identity with the corresponding G. orontii gene.

[0259] Embodiment 247: The isolated dsRNA according to any one of embodiments 1-246, wherein said ortholog encodes a protein that shares at least 50% sequence identity, or at least 75% sequence identity, or at least 80% sequence identity, or at least 85% sequence identity, or at least 90% sequence identity, or at least 95% sequence identity, or at least 98% sequence identity with a protein expressed by the corresponding G. orontii gene.

[0260] Embodiment 248: The isolated dsRNA molecule according to any one of embodiments 1-247, wherein the dsRNA molecule comprises two annealed complementary RNA strands.

[0261] Embodiment 249: The isolated dsRNA molecule according to any one of embodiments 1-248, wherein said dsRNA molecule comprises a nucleotide sequence that is complementary to at least 17 contiguous nucleotides of one or more of said target G. orontii genes or target G. orontii gene orthologs, or an RNA transcribed therefrom.

[0262] Embodiment 250: The isolated dsRNA molecule according to any one of embodiments 1-248, wherein said dsRNA molecule comprises a long dsRNA, a small inhibitory RNA (siRNA), a small hairpin RNA (shRNA), tasiRNA, or a miRNA.

[0263] Embodiment 251: The isolated dsRNA molecule of embodiment 250, wherein said dsRNA comprises a long dsRNA.

[0264] Embodiment 252: The isolated dsRNA molecule of embodiment 250, wherein said dsRNA comprises a small inhibitory RNA (siRNA).

[0265] Embodiment 253: The isolated dsRNA molecule of embodiment 250, wherein said dsRNA comprises a small hairpin RNA (shRNA).

[0266] Embodiment 254: The isolated dsRNA molecule according to any one of embodiments 1-253, wherein said dsRNA molecule comprises a nucleotide sequence that is complementary to about 17 to 21 contiguous nucleotides, or complementary to about 17 to 50 contiguous nucleotides, or complementary to about 50 to 100 contiguous nucleotides, or complementary to about 50 to 250 contiguous nucleotides, or complementary to about 250-600 contiguous nucleotides, or complementary to about 500-1,000 contiguous nucleotides of one or more of said target G. orontii genes or target G. orontii gene orthologs, or an RNA transcribed therefrom.

[0267] Embodiment 255: The isolated dsRNA molecule according to any one of embodiments 1-254, wherein said dsRNA molecule comprises a nucleic acid sequence complementary to about 17 to 21 contiguous nucleotides, or complementary to about 17 to 50 contiguous nucleotides, or complementary to about 50 to 100 contiguous nucleotides, or complementary to about 50 to 250 contiguous nucleotides, or complementary to about 250-600 contiguous nucleotides, or complementary to about 500-1,000 contiguous nucleotides of the protein coding region of one or more of said target G. orontii genes or target G. orontii gene orthologs or an RNA transcribed therefrom.

[0268] Embodiment 256: The isolated dsRNA molecule of any one of embodiments 1-255, wherein said dsRNA molecule comprises a nucleic acid sequence complementary to about about 17 to 21 contiguous nucleotides, or complementary to about 17 to 50 contiguous nucleotides, or complementary to about 50 to 100 contiguous nucleotides, or complementary to about 50 to 250 contiguous nucleotides, or complementary to about 250-600 contiguous nucleotides, or complementary to about 500-1,000 contiguous nucleotides of the 5′ UTR region or the 3′ UTR region said target G. orontii genes or target G. orontii gene orthologs.

[0269] Embodiment 257: The isolated dsRNA molecule of any one of embodiments 1-256, wherein said dsRNA molecule has length ranging from about 17 nt, or from about 21 nt, or from about 50 nt, or from about 100 nu up to about 500 nt, or up to about 400 nt, or up to about 200 nt, or up to about 200 nt, or up to about 150 nt.

[0270] Embodiment 258: The isolated dsRNA molecule of embodiment 257, wherein said dsRNA molecule has a length ranging from about 150 nt up to about 500 nt.

[0271] Embodiment 259: The isolated dsRNA molecule of any one of embodiments 1-258, wherein said dsRNA molecule comprises a nucleic acid sequence complementary to a contiguous region comprising at least about 0.1%, 0.5%, 1%, 5%, 10%, 25%, 50%, 60%, 70%, 80%, 90%, 95%, 98%, 99%, or 100% of the length of the target gene sequence protein coding region, 5′ UTR region, or 3′ UTR region of said target G. orontii genes or target G. orontii gene orthologs.

[0272] Embodiment 260: The isolated dsRNA molecule of any one of embodiments 1-259, wherein the dsRNA molecule comprises a single RNA strand comprising an inversely repeated sequence with a spacer in between and wherein the single RNA strand can anneal to itself to form a hairpin loop structure.

[0273] Embodiment 261: The isolated dsRNA molecule of embodiment 260, wherein the dsRNA is about 30 nucleotides or shorter in length.

[0274] Embodiment 262: The isolated dsRNA molecule of embodiment 261, wherein said dsRNA ranges in length from about 25-29 nucleotides in length.

[0275] Embodiment 263: The isolated dsRNA molecule according to any one of embodiments 260-262, wherein said dsRNA comprises a duplex length ranging from about 17-21 nucleotides or from about 18-23 nucleotides, or from about 19-21 nucleotides.

[0276] Embodiment 264: The isolated dsRNA molecule according to any one of embodiments 260-263 wherein said dsRNA comprises a loop sequence ranging from 3 to 9 nucleotides in length or has a loop length of 5, 7, or 9 nucleotides.

[0277] Embodiment 265: The isolated dsRNA molecule of any one of embodiments 1-264, wherein said dsRNA is capable of reducing spore count of said phytopathogenic fungus when infecting a plant comprising said dsRNA as compared to a plant without said dsRNA.

[0278] Embodiment 266: The isolated dsRNA molecule of any one of embodiments 1-265, wherein said dsRNA is capable of reducing hyphal length of said phytopathogenic fungus when infecting a plant comprising said dsRNA as compared to a plant without said dsRNA.

[0279] Embodiment 267: The isolated dsRNA molecule of any one of embodiments 1-266, wherein said dsRNA is capable of reducing germination of said phytopathogenic fungus when infecting a plant comprising said dsRNA as compared to a plant without said dsRNA.

[0280] Embodiment 268: The isolated dsRNA molecule of any one of embodiments 1-266, wherein said dsRNA is capable of reducing penetration of the host plant by the pathogen when infecting a plant comprising said dsRNA as compared to a plant without said dsRNA.

[0281] Embodiment 269: The isolated dsRNA molecule of any one of embodiments 1-268, wherein said dsRNA comprises a nucleotide sequence selected from the group consisting of SEQ ID NO: 212, SEQ ID NO:213, SEQ ID NO:214, SEQ ID NO:215, SEQ ID NO:216, SEQ ID NO:217, SEQ ID NO:218, SEQ ID NO:219, SEQ ID NO:220, SEQ ID NO:221, SEQ ID NO:222, SEQ ID NO:223, SEQ ID NO:224, SEQ ID NO:225, SEQ ID NO:226, SEQ ID NO:227, SEQ ID NO:228, SEQ ID NO:229, SEQ ID NO:230, SEQ ID NO:231, SEQ ID NO:232, SEQ ID NO:233, SEQ ID NO:234, SEQ ID NO:235, SEQ ID NO:236, SEQ ID NO:237, SEQ ID NO:238, SEQ ID NO:239, SEQ ID NO:240, SEQ ID NO:241, SEQ ID NO:242, SEQ ID NO:243, SEQ ID NO:244, SEQ ID NO:245, SEQ ID NO:246, SEQ ID NO:247, SEQ ID NO:248, SEQ ID NO:249, SEQ ID NO:250, SEQ ID NO:251, SEQ ID NO:252, SEQ ID NO:253, SEQ ID NO:254, and SEQ ID NO:255.

[0282] Embodiment 270: The isolated dsRNA of embodiment 269, wherein said dsRNA comprises the sequence of SEQ ID NO:212.

[0283] Embodiment 271: The isolated dsRNA according to any one of embodiments 269, wherein said dsRNA comprises the sequence of SEQ ID NO:213.

[0284] Embodiment 272: The isolated dsRNA according to any one of embodiments 269, wherein said dsRNA comprises the sequence of SEQ ID NO:214.

[0285] Embodiment 273: The isolated dsRNA according to any one of embodiments 269, wherein said dsRNA comprises the sequence of SEQ ID NO:215.

[0286] Embodiment 274: The isolated dsRNA according to any one of embodiments 269, wherein said dsRNA comprises the sequence of SEQ ID NO:216.

[0287] Embodiment 275: The isolated dsRNA according to any one of embodiments 269, wherein said dsRNA comprises the sequence of SEQ ID NO:217.

[0288] Embodiment 276: The isolated dsRNA according to any one of embodiments 269, wherein said dsRNA comprises the sequence of SEQ ID NO:218.

[0289] Embodiment 277: The isolated dsRNA according to any one of embodiments 269, wherein said dsRNA comprises the sequence of SEQ ID NO:219.

[0290] Embodiment 278: The isolated dsRNA according to any one of embodiments 269, wherein said dsRNA comprises the sequence of SEQ ID NO:220.

[0291] Embodiment 279: The isolated dsRNA according to any one of embodiments 269, wherein said dsRNA comprises the sequence of SEQ ID NO:221.

[0292] Embodiment 280: The isolated dsRNA according to any one of embodiments 269, wherein said dsRNA comprises the sequence of SEQ ID NO:222.

[0293] Embodiment 281: The isolated dsRNA according to any one of embodiments 269, wherein said dsRNA comprises the sequence of SEQ ID NO:223.

[0294] Embodiment 282: The isolated dsRNA according to any one of embodiments 269, wherein said dsRNA comprises the sequence of SEQ ID NO:224.

[0295] Embodiment 283: The isolated dsRNA according to any one of embodiments 269, wherein said dsRNA comprises the sequence of SEQ ID NO:225.

[0296] Embodiment 284: The isolated dsRNA according to any one of embodiments 269, wherein said dsRNA comprises the sequence of SEQ ID NO:226.

[0297] Embodiment 285: The isolated dsRNA according to any one of embodiments 269, wherein said dsRNA comprises the sequence of SEQ ID NO:227.

[0298] Embodiment 286: The isolated dsRNA according to any one of embodiments 269, wherein said dsRNA comprises the sequence of SEQ ID NO:228.

[0299] Embodiment 287: The isolated dsRNA according to any one of embodiments 269, wherein said dsRNA comprises the sequence of SEQ ID NO:229.

[0300] Embodiment 288: The isolated dsRNA according to any one of embodiments 269, wherein said dsRNA comprises the sequence of SEQ ID NO:230.

[0301] Embodiment 289: The isolated dsRNA according to any one of embodiments 269, wherein said dsRNA comprises the sequence of SEQ ID NO:231.

[0302] Embodiment 290: The isolated dsRNA according to any one of embodiments 269, wherein said dsRNA comprises the sequence of SEQ ID NO:232.

[0303] Embodiment 291: The isolated dsRNA according to any one of embodiments 269, wherein said dsRNA comprises the sequence of SEQ ID NO:233.

[0304] Embodiment 292: The isolated dsRNA according to any one of embodiments 269, wherein said dsRNA comprises the sequence of SEQ ID NO:234.

[0305] Embodiment 293: The isolated dsRNA according to any one of embodiments 269, wherein said dsRNA comprises the sequence of SEQ ID NO:235.

[0306] Embodiment 294: The isolated dsRNA according to any one of embodiments 269, wherein said dsRNA comprises the sequence of SEQ ID NO:236.

[0307] Embodiment 295: The isolated dsRNA according to any one of embodiments 269, wherein said dsRNA comprises the sequence of SEQ ID NO:237.

[0308] Embodiment 296: The isolated dsRNA according to any one of embodiments 269, wherein said dsRNA comprises the sequence of SEQ ID NO:238.

[0309] Embodiment 297: The isolated dsRNA according to any one of embodiments 269, wherein said dsRNA comprises the sequence of SEQ ID NO:239.

[0310] Embodiment 298: The isolated dsRNA according to any one of embodiments 269, wherein said dsRNA comprises the sequence of SEQ ID NO:240.

[0311] Embodiment 299: The isolated dsRNA according to any one of embodiments 269, wherein said dsRNA comprises the sequence of SEQ ID NO:241.

[0312] Embodiment 300: The isolated dsRNA according to any one of embodiments 269, wherein said dsRNA comprises the sequence of SEQ ID NO:242.

[0313] Embodiment 301: The isolated dsRNA according to any one of embodiments 269, wherein said dsRNA comprises the sequence of SEQ ID NO:243.

[0314] Embodiment 302: The isolated dsRNA according to any one of embodiments 269, wherein said dsRNA comprises the sequence of SEQ ID NO:244.

[0315] Embodiment 303: The isolated dsRNA according to any one of embodiments 269, wherein said dsRNA comprises the sequence of SEQ ID NO:245.

[0316] Embodiment 304: The isolated dsRNA according to any one of embodiments 269, wherein said dsRNA comprises the sequence of SEQ ID NO:246.

[0317] Embodiment 305: The isolated dsRNA according to any one of embodiments 269, wherein said dsRNA comprises the sequence of SEQ ID NO:247.

[0318] Embodiment 306: The isolated dsRNA according to any one of embodiments 269, wherein said dsRNA comprises the sequence of SEQ ID NO:248.

[0319] Embodiment 307: The isolated dsRNA according to any one of embodiments 269, wherein said dsRNA comprises the sequence of SEQ ID NO:249.

[0320] Embodiment 308: The isolated dsRNA according to any one of embodiments 269, wherein said dsRNA comprises the sequence of SEQ ID NO:250.

[0321] Embodiment 309: The isolated dsRNA according to any one of embodiments 269, wherein said dsRNA comprises the sequence of SEQ ID NO:251.

[0322] Embodiment 310: The isolated dsRNA according to any one of embodiments 269, wherein said dsRNA comprises the sequence of SEQ ID NO:252.

[0323] Embodiment 311: The isolated dsRNA according to any one of embodiments 269, wherein said dsRNA comprises the sequence of SEQ ID NO:253.

[0324] Embodiment 312: The isolated dsRNA according to any one of embodiments 269, wherein said dsRNA comprises the sequence of SEQ ID NO:254.

[0325] Embodiment 313: The isolated dsRNA according to any one of embodiments 269, wherein said dsRNA comprises the sequence of SEQ ID NO:255.

[0326] Embodiment 314: A composition for controlling or preventing an infection of a plant by a phytopathogenic fungus, said composition comprising one or more of said isolated dsRNA molecules according to any one of embodiments 1-313.

[0327] Embodiment 315: The composition of embodiment 314, wherein said composition comprises a dsRNA that down regulates one of said genes or orthologs.

[0328] Embodiment 316: The composition of embodiment 314, wherein said composition comprises dsRNA(s) that downregulate 2, or 3, or 4, or 5, or 6, or 7, or 8, or 9, or 10, or more of said genes or orthologs.

[0329] Embodiment 317: The composition of embodiment 316, wherein said composition comprises two or more dsRNA(s) that inhibit or are capable of downregulating expression of the two or more target genes independently selected from the group consisting of SEQ ID NO:1, SEQ ID NO:2, SEQ ID NO:3, SEQ ID NO:4, SEQ ID NO:5, SEQ ID NO:6, SEQ ID NO:7, SEQ ID NO:8, SEQ ID NO:9, SEQ ID NO:10, SEQ ID NO:11, SEQ ID NO:12, SEQ ID NO:13, SEQ ID NO:14, SEQ ID NO:15, SEQ ID NO:16, SEQ ID NO:17, SEQ ID NO:18, SEQ ID NO:19, SEQ ID NO:20, SEQ ID NO:21, SEQ ID NO:22, SEQ ID NO:23, SEQ ID NO:24, SEQ ID NO:25, SEQ ID NO:26, SEQ ID NO:27, SEQ ID NO:28, SEQ ID NO:29, SEQ ID NO:30, SEQ ID NO:31, SEQ ID NO:32, SEQ ID NO:33, SEQ ID NO:34, SEQ ID NO:35, SEQ ID NO:36, SEQ ID NO:37, SEQ ID NO:38, SEQ ID NO:39, SEQ ID NO:40, SEQ ID NO:41, SEQ ID NO:42, SEQ ID NO:43, SEQ ID NO:44, SEQ ID NO:45, SEQ ID NO:46, SEQ ID NO:47, SEQ ID NO:48, SEQ ID NO:49, SEQ ID NO:50, SEQ ID NO:51, SEQ ID NO:52, SEQ ID NO:53, SEQ ID NO:54, SEQ ID NO:55, SEQ ID NO:56, SEQ ID NO:57, SEQ ID NO:58, SEQ ID NO:59, SEQ ID NO:60, SEQ ID NO:61, SEQ ID NO:62, SEQ ID NO:63, SEQ ID NO:64, SEQ ID NO:65, SEQ ID NO:66, SEQ ID NO:67, SEQ ID NO:68, SEQ ID NO:69, SEQ ID NO:70, SEQ ID NO:71, SEQ ID NO:72, SEQ ID NO:73, SEQ ID NO:74, SEQ ID NO:75, SEQ ID NO:76, SEQ ID NO:77, SEQ ID NO:78, SEQ ID NO:79, SEQ ID NO:80, SEQ ID NO:81, SEQ ID NO:82, SEQ ID NO:83, SEQ ID NO:84, SEQ ID NO:85, SEQ ID NO:86, SEQ ID NO:87, SEQ ID NO:88, SEQ ID NO:89, SEQ ID NO:90, SEQ ID NO:91, SEQ ID NO:92, SEQ ID NO:93, SEQ ID NO:94, SEQ ID NO:95, SEQ ID NO:96, SEQ ID NO:97, SEQ ID NO:98, SEQ ID NO:99, SEQ ID NO:100, SEQ ID NO:101, SEQ ID NO:102, SEQ ID NO:103, SEQ ID NO:104, SEQ ID NO:105, SEQ ID NO:106, SEQ ID NO:107, SEQ ID NO: 108, SEQ ID NO: 109, SEQ ID NO:110, SEQ ID NO:111, SEQ ID NO:112, SEQ ID NO:113, SEQ ID NO:114, SEQ ID NO:115, SEQ ID NO:116, SEQ ID NO:117, SEQ ID NO:118, SEQ ID NO:119, SEQ ID NO:120, SEQ ID NO:121, SEQ ID NO:122, SEQ ID NO:123, SEQ ID NO:124, SEQ ID NO:125, SEQ ID NO:126, SEQ ID NO:127, SEQ ID NO:128, SEQ ID NO:129, SEQ ID NO:130, SEQ ID NO:131, SEQ ID NO:132, SEQ ID NO: 133, SEQ ID NO: 134, SEQ ID NO:135, SEQ ID NO:136, SEQ ID NO:137, SEQ ID NO: 138, SEQ ID NO: 139, SEQ ID NO:140, SEQ ID NO:141, SEQ ID NO:142, SEQ ID NO:143, SEQ ID NO:144, SEQ ID NO:145, SEQ ID NO:146, SEQ ID NO:147, SEQ ID NO: 148, SEQ ID NO: 149, SEQ ID NO:150, SEQ ID NO:151, SEQ ID NO:152, SEQ ID NO: 153, SEQ ID NO: 154, SEQ ID NO:155, SEQ ID NO:156, SEQ ID NO:157, SEQ ID NO: 158, SEQ ID NO: 159, SEQ ID NO:160, SEQ ID NO:161, SEQ ID NO:162, SEQ ID NO:163, SEQ ID NO:164, SEQ ID NO:165, SEQ ID NO:166, SEQ ID NO:167, SEQ ID NO: 168, SEQ ID NO: 169, SEQ ID NO:170, SEQ ID NO:171, SEQ ID NO:172, SEQ ID NO:173, SEQ ID NO:174, SEQ ID NO:175, SEQ ID NO:176, SEQ ID NO:177, SEQ ID NO: 178, SEQ ID NO: 179, SEQ ID NO:180, SEQ ID NO:181, SEQ ID NO:182, SEQ ID NO:183, SEQ ID NO:184, SEQ ID NO:185, SEQ ID NO:186, SEQ ID NO:187, SEQ ID NO:188, SEQ ID NO:189, SEQ ID NO:190, SEQ ID NO:191, SEQ ID NO:192, SEQ ID NO:193, SEQ ID NO:194, SEQ ID NO:195, SEQ ID NO:196, SEQ ID NO:197, SEQ ID NO: 198, SEQ ID NO: 199, SEQ ID NO:200, SEQ ID NO:201, SEQ ID NO:202, SEQ ID NO:203, SEQ ID NO:204, SEQ ID NO:205, SEQ ID NO:206, SEQ ID NO:207, SEQ ID NO:208, SEQ ID NO:209, SEQ ID NO:210, SEQ ID NO:211, SEQ ID NO:212, SEQ ID NO:213, SEQ ID NO:214, SEQ ID NO:215, SEQ ID NO:216, SEQ ID NO:217, SEQ ID NO:218, SEQ ID NO:219, SEQ ID NO:220, SEQ ID NO:221, SEQ ID NO:222, SEQ ID NO:223, SEQ ID NO:224, SEQ ID NO:225, SEQ ID NO:226, SEQ ID NO:227, SEQ ID NO:228, SEQ ID NO:229, SEQ ID NO:230, SEQ ID NO:231, SEQ ID NO:232, SEQ ID NO:233, SEQ ID NO:234, SEQ ID NO:235, SEQ ID NO:236, SEQ ID NO:237, SEQ ID NO:238, SEQ ID NO:239, SEQ ID NO:240, SEQ ID NO:241, SEQ ID NO:242, SEQ ID NO:243, SEQ ID NO:244, SEQ ID NO:245, SEQ ID NO:246, SEQ ID NO:247, SEQ ID NO:248, SEQ ID NO:249, SEQ ID NO:250, SEQ ID NO:251, SEQ ID NO:252, SEQ ID NO:253, SEQ ID NO:254, and SEQ ID NO:255.

[0330] Embodiment 318: The composition of embodiment 317, wherein said composition comprises a dsRNA that inhibits or is capable of downregulating expression of the target gene of SEQ ID NO:1 or an orthologue thereof.

[0331] Embodiment 319: The composition according to any one of embodiments 317-318, wherein said composition comprises a dsRNA that inhibits or is capable of downregulating expression of the target gene of SEQ ID NO:2 or an orthologue thereof.

[0332] Embodiment 320: The composition according to any one of embodiments 317-319, wherein said composition comprises a dsRNA that inhibits or is capable of downregulating expression of the target gene of SEQ ID NO:3 or an orthologue thereof.

[0333] Embodiment 321: The composition according to any one of embodiments 317-320, wherein said composition comprises a dsRNA that inhibits or is capable of downregulating expression of the target gene of SEQ ID NO:4 or an orthologue thereof.

[0334] Embodiment 322: The composition according to any one of embodiments 317-321, wherein said composition comprises a dsRNA that inhibits or is capable of downregulating expression of the target gene of SEQ ID NO:5 or an orthologue thereof.

[0335] Embodiment 323: The composition according to any one of embodiments 317-322, wherein said composition comprises a dsRNA that inhibits or is capable of downregulating expression of the target gene of SEQ ID NO:6 or an orthologue thereof.

[0336] Embodiment 324: The composition according to any one of embodiments 317-323, wherein said composition comprises a dsRNA that inhibits or is capable of downregulating expression of the target gene of SEQ ID NO:7 or an orthologue thereof.

[0337] Embodiment 325: The composition according to any one of embodiments 317-324, wherein said composition comprises a dsRNA that inhibits or is capable of downregulating expression of the target gene of SEQ ID NO:8 or an orthologue thereof.

[0338] Embodiment 326: The composition according to any one of embodiments 317-325, wherein said composition comprises a dsRNA that inhibits or is capable of downregulating expression of the target gene of SEQ ID NO:9 or an orthologue thereof.

[0339] Embodiment 327: The composition according to any one of embodiments 317-326, wherein said composition comprises a dsRNA that inhibits or is capable of downregulating expression of the target gene of SEQ ID NO:10 or an orthologue thereof.

[0340] Embodiment 328: The composition according to any one of embodiments 317-327, wherein said composition comprises a dsRNA that inhibits or is capable of downregulating expression of the target gene of SEQ ID NO:11 or an orthologue thereof.

[0341] Embodiment 329: The composition according to any one of embodiments 317-328, wherein said composition comprises a dsRNA that inhibits or is capable of downregulating expression of the target gene of SEQ ID NO:12 or an orthologue thereof.

[0342] Embodiment 330: The composition according to any one of embodiments 317-329, wherein said composition comprises a dsRNA that inhibits or is capable of downregulating expression of the target gene of SEQ ID NO:13 or an orthologue thereof.

[0343] Embodiment 331: The composition according to any one of embodiments 317-330, wherein said composition comprises a dsRNA that inhibits or is capable of downregulating expression of the target gene of SEQ ID NO:14 or an orthologue thereof.

[0344] Embodiment 332: The composition according to any one of embodiments 317-331, wherein said composition comprises a dsRNA that inhibits or is capable of downregulating expression of the target gene of SEQ ID NO:15 or an orthologue thereof.

[0345] Embodiment 333: The composition according to any one of embodiments 317-332, wherein said composition comprises a dsRNA that inhibits or is capable of downregulating expression of the target gene of SEQ ID NO:16 or an orthologue thereof.

[0346] Embodiment 334: The composition according to any one of embodiments 317-333, wherein said composition comprises a dsRNA that inhibits or is capable of downregulating expression of the target gene of SEQ ID NO:17 or an orthologue thereof.

[0347] Embodiment 335: The composition according to any one of embodiments 317-334, wherein said composition comprises a dsRNA that inhibits or is capable of downregulating expression of the target gene of SEQ ID NO:18 or an orthologue thereof.

[0348] Embodiment 336: The composition according to any one of embodiments 317-335, wherein said composition comprises a dsRNA that inhibits or is capable of downregulating expression of the target gene of SEQ ID NO:19 or an orthologue thereof.

[0349] Embodiment 337: The composition according to any one of embodiments 317-336, wherein said composition comprises a dsRNA that inhibits or is capable of downregulating expression of the target gene of SEQ ID NO:20 or an orthologue thereof.

[0350] Embodiment 338: The composition according to any one of embodiments 317-337, wherein said composition comprises a dsRNA that inhibits or is capable of downregulating expression of the target gene of SEQ ID NO:21 or an orthologue thereof.

[0351] Embodiment 339: The composition according to any one of embodiments 317-338, wherein said composition comprises a dsRNA that inhibits or is capable of downregulating expression of the target gene of SEQ ID NO:22 or an orthologue thereof.

[0352] Embodiment 340: The composition according to any one of embodiments 317-339, wherein said composition comprises a dsRNA that inhibits or is capable of downregulating expression of the target gene of SEQ ID NO:23 or an orthologue thereof.

[0353] Embodiment 341: The composition according to any one of embodiments 317-340, wherein said composition comprises a dsRNA that inhibits or is capable of downregulating expression of the target gene of SEQ ID NO:24 or an orthologue thereof.

[0354] Embodiment 342: The composition according to any one of embodiments 317-341, wherein said composition comprises a dsRNA that inhibits or is capable of downregulating expression of the target gene of SEQ ID NO:25 or an orthologue thereof.

[0355] Embodiment 343: The composition according to any one of embodiments 317-342, wherein said composition comprises a dsRNA that inhibits or is capable of downregulating expression of the target gene of SEQ ID NO:26 or an orthologue thereof.

[0356] Embodiment 344: The composition according to any one of embodiments 317-343, wherein said composition comprises a dsRNA that inhibits or is capable of downregulating expression of the target gene of SEQ ID NO:27 or an orthologue thereof.

[0357] Embodiment 345: The composition according to any one of embodiments 317-344, wherein said composition comprises a dsRNA that inhibits or is capable of downregulating expression of the target gene of SEQ ID NO:28 or an orthologue thereof.

[0358] Embodiment 346: The composition according to any one of embodiments 317-345, wherein said composition comprises a dsRNA that inhibits or is capable of downregulating expression of the target gene of SEQ ID NO:29 or an orthologue thereof.

[0359] Embodiment 347: The composition according to any one of embodiments 317-346, wherein said composition comprises a dsRNA that inhibits or is capable of downregulating expression of the target gene of SEQ ID NO:30 or an orthologue thereof.

[0360] Embodiment 348: The composition according to any one of embodiments 317-347, wherein said composition comprises a dsRNA that inhibits or is capable of downregulating expression of the target gene of SEQ ID NO:31 or an orthologue thereof.

[0361] Embodiment 349: The composition according to any one of embodiments 317-348, wherein said composition comprises a dsRNA that inhibits or is capable of downregulating expression of the target gene of SEQ ID NO:32 or an orthologue thereof.

[0362] Embodiment 350: The composition according to any one of embodiments 317-349, wherein said composition comprises a dsRNA that inhibits or is capable of downregulating expression of the target gene of SEQ ID NO:33 or an orthologue thereof.

[0363] Embodiment 351: The composition according to any one of embodiments 317-350, wherein said composition comprises a dsRNA that inhibits or is capable of downregulating expression of the target gene of SEQ ID NO:34 or an orthologue thereof.

[0364] Embodiment 352: The composition according to any one of embodiments 317-351, wherein said composition comprises a dsRNA that inhibits or is capable of downregulating expression of the target gene of SEQ ID NO:35 or an orthologue thereof.

[0365] Embodiment 353: The composition according to any one of embodiments 317-352, wherein said composition comprises a dsRNA that inhibits or is capable of downregulating expression of the target gene of SEQ ID NO:36 or an orthologue thereof.

[0366] Embodiment 354: The composition according to any one of embodiments 317-353, wherein said composition comprises a dsRNA that inhibits or is capable of downregulating expression of the target gene of SEQ ID NO:37 or an orthologue thereof.

[0367] Embodiment 355: The composition according to any one of embodiments 317-354, wherein said composition comprises a dsRNA that inhibits or is capable of downregulating expression of the target gene of SEQ ID NO:38 or an orthologue thereof.

[0368] Embodiment 356: The composition according to any one of embodiments 317-355, wherein said composition comprises a dsRNA that inhibits or is capable of downregulating expression of the target gene of SEQ ID NO:39 or an orthologue thereof.

[0369] Embodiment 357: The composition according to any one of embodiments 317-356, wherein said composition comprises a dsRNA that inhibits or is capable of downregulating expression of the target gene of SEQ ID NO:40 or an orthologue thereof.

[0370] Embodiment 358: The composition according to any one of embodiments 317-357, wherein said composition comprises a dsRNA that inhibits or is capable of downregulating expression of the target gene of SEQ ID NO:41 or an orthologue thereof.

[0371] Embodiment 359: The composition according to any one of embodiments 317-358, wherein said composition comprises a dsRNA that inhibits or is capable of downregulating expression of the target gene of SEQ ID NO:42 or an orthologue thereof.

[0372] Embodiment 360: The composition according to any one of embodiments 317-359, wherein said composition comprises a dsRNA that inhibits or is capable of downregulating expression of the target gene of SEQ ID NO:43 or an orthologue thereof.

[0373] Embodiment 361: The composition according to any one of embodiments 317-360, wherein said composition comprises a dsRNA that inhibits or is capable of downregulating expression of the target gene of SEQ ID NO:44 or an orthologue thereof.

[0374] Embodiment 362: The composition according to any one of embodiments 317-361, wherein said composition comprises a dsRNA that inhibits or is capable of downregulating expression of the target gene of SEQ ID NO:45 or an orthologue thereof.

[0375] Embodiment 363: The composition according to any one of embodiments 317-362, wherein said composition comprises a dsRNA that inhibits or is capable of downregulating expression of the target gene of SEQ ID NO:46 or an orthologue thereof.

[0376] Embodiment 364: The composition according to any one of embodiments 317-363, wherein said composition comprises a dsRNA that inhibits or is capable of downregulating expression of the target gene of SEQ ID NO:47 or an orthologue thereof.

[0377] Embodiment 365: The composition according to any one of embodiments 317-364, wherein said composition comprises a dsRNA that inhibits or is capable of downregulating expression of the target gene of SEQ ID NO:48 or an orthologue thereof.

[0378] Embodiment 366: The composition according to any one of embodiments 317-365, wherein said composition comprises a dsRNA that inhibits or is capable of downregulating expression of the target gene of SEQ ID NO:49 or an orthologue thereof.

[0379] Embodiment 367: The composition according to any one of embodiments 317-366, wherein said composition comprises a dsRNA that inhibits or is capable of downregulating expression of the target gene of SEQ ID NO:50 or an orthologue thereof.

[0380] Embodiment 368: The composition according to any one of embodiments 317-367, wherein said composition comprises a dsRNA that inhibits or is capable of downregulating expression of the target gene of SEQ ID NO:51 or an orthologue thereof.

[0381] Embodiment 369: The composition according to any one of embodiments 317-368, wherein said composition comprises a dsRNA that inhibits or is capable of downregulating expression of the target gene of SEQ ID NO:52 or an orthologue thereof.

[0382] Embodiment 370: The composition according to any one of embodiments 317-369, wherein said composition comprises a dsRNA that inhibits or is capable of downregulating expression of the target gene of SEQ ID NO:53 or an orthologue thereof.

[0383] Embodiment 371: The composition according to any one of embodiments 317-370, wherein said composition comprises a dsRNA that inhibits or is capable of downregulating expression of the target gene of SEQ ID NO:54 or an orthologue thereof.

[0384] Embodiment 372: The composition according to any one of embodiments 317-371, wherein said composition comprises a dsRNA that inhibits or is capable of downregulating expression of the target gene of SEQ ID NO:55 or an orthologue thereof.

[0385] Embodiment 373: The composition according to any one of embodiments 317-372, wherein said composition comprises a dsRNA that inhibits or is capable of downregulating expression of the target gene of SEQ ID NO:56 or an orthologue thereof.

[0386] Embodiment 374: The composition according to any one of embodiments 317-373, wherein said composition comprises a dsRNA that inhibits or is capable of downregulating expression of the target gene of SEQ ID NO:57 or an orthologue thereof.

[0387] Embodiment 375: The composition according to any one of embodiments 317-374, wherein said composition comprises a dsRNA that inhibits or is capable of downregulating expression of the target gene of SEQ ID NO:58 or an orthologue thereof.

[0388] Embodiment 376: The composition according to any one of embodiments 317-375, wherein said composition comprises a dsRNA that inhibits or is capable of downregulating expression of the target gene of SEQ ID NO:59 or an orthologue thereof.

[0389] Embodiment 377: The composition according to any one of embodiments 317-376, wherein said composition comprises a dsRNA that inhibits or is capable of downregulating expression of the target gene of SEQ ID NO:60 or an orthologue thereof.

[0390] Embodiment 378: The composition according to any one of embodiments 317-377, wherein said composition comprises a dsRNA that inhibits or is capable of downregulating expression of the target gene of SEQ ID NO:61 or an orthologue thereof.

[0391] Embodiment 379: The composition according to any one of embodiments 317-378, wherein said composition comprises a dsRNA that inhibits or is capable of downregulating expression of the target gene of SEQ ID NO:62 or an orthologue thereof.

[0392] Embodiment 380: The composition according to any one of embodiments 317-379, wherein said composition comprises a dsRNA that inhibits or is capable of downregulating expression of the target gene of SEQ ID NO:63 or an orthologue thereof.

[0393] Embodiment 381: The composition according to any one of embodiments 317-380, wherein said composition comprises a dsRNA that inhibits or is capable of downregulating expression of the target gene of SEQ ID NO:64 or an orthologue thereof.

[0394] Embodiment 382: The composition according to any one of embodiments 317-381, wherein said composition comprises a dsRNA that inhibits or is capable of downregulating expression of the target gene of SEQ ID NO:65 or an orthologue thereof.

[0395] Embodiment 383: The composition according to any one of embodiments 317-382, wherein said composition comprises a dsRNA that inhibits or is capable of downregulating expression of the target gene of SEQ ID NO:66 or an orthologue thereof.

[0396] Embodiment 384: The composition according to any one of embodiments 317-383, wherein said composition comprises a dsRNA that inhibits or is capable of downregulating expression of the target gene of SEQ ID NO:67 or an orthologue thereof.

[0397] Embodiment 385: The composition according to any one of embodiments 317-384, wherein said composition comprises a dsRNA that inhibits or is capable of downregulating expression of the target gene of SEQ ID NO:68 or an orthologue thereof.

[0398] Embodiment 386: The composition according to any one of embodiments 317-385, wherein said composition comprises a dsRNA that inhibits or is capable of downregulating expression of the target gene of SEQ ID NO:69 or an orthologue thereof.

[0399] Embodiment 387: The composition according to any one of embodiments 317-386, wherein said composition comprises a dsRNA that inhibits or is capable of downregulating expression of the target gene of SEQ ID NO:70 or an orthologue thereof.

[0400] Embodiment 388: The composition according to any one of embodiments 317-387, wherein said composition comprises a dsRNA that inhibits or is capable of downregulating expression of the target gene of SEQ ID NO:71 or an orthologue thereof.

[0401] Embodiment 389: The composition according to any one of embodiments 317-388, wherein said composition comprises a dsRNA that inhibits or is capable of downregulating expression of the target gene of SEQ ID NO:72 or an orthologue thereof.

[0402] Embodiment 390: The composition according to any one of embodiments 317-389, wherein said composition comprises a dsRNA that inhibits or is capable of downregulating expression of the target gene of SEQ ID NO:73 or an orthologue thereof.

[0403] Embodiment 391: The composition according to any one of embodiments 317-390, wherein said composition comprises a dsRNA that inhibits or is capable of downregulating expression of the target gene of SEQ ID NO:74 or an orthologue thereof.

[0404] Embodiment 392: The composition according to any one of embodiments 317-391, wherein said composition comprises a dsRNA that inhibits or is capable of downregulating expression of the target gene of SEQ ID NO:75 or an orthologue thereof.

[0405] Embodiment 393: The composition according to any one of embodiments 317-392, wherein said composition comprises a dsRNA that inhibits or is capable of downregulating expression of the target gene of SEQ ID NO:76 or an orthologue thereof.

[0406] Embodiment 394: The composition according to any one of embodiments 317-393, wherein said composition comprises a dsRNA that inhibits or is capable of downregulating expression of the target gene of SEQ ID NO:77 or an orthologue thereof.

[0407] Embodiment 395: The composition according to any one of embodiments 317-394, wherein said composition comprises a dsRNA that inhibits or is capable of downregulating expression of the target gene of SEQ ID NO:78 or an orthologue thereof.

[0408] Embodiment 396: The composition according to any one of embodiments 317-395, wherein said composition comprises a dsRNA that inhibits or is capable of downregulating expression of the target gene of SEQ ID NO:79 or an orthologue thereof.

[0409] Embodiment 397: The composition according to any one of embodiments 317-396, wherein said composition comprises a dsRNA that inhibits or is capable of downregulating expression of the target gene of SEQ ID NO:80 or an orthologue thereof.

[0410] Embodiment 398: The composition according to any one of embodiments 317-397, wherein said composition comprises a dsRNA that inhibits or is capable of downregulating expression of the target gene of SEQ ID NO:81 or an orthologue thereof.

[0411] Embodiment 399: The composition according to any one of embodiments 317-398, wherein said composition comprises a dsRNA that inhibits or is capable of downregulating expression of the target gene of SEQ ID NO:82 or an orthologue thereof.

[0412] Embodiment 400: The composition according to any one of embodiments 317-399, wherein said composition comprises a dsRNA that inhibits or is capable of downregulating expression of the target gene of SEQ ID NO:83 or an orthologue thereof.

[0413] Embodiment 401: The composition according to any one of embodiments 317-400, wherein said composition comprises a dsRNA that inhibits or is capable of downregulating expression of the target gene of SEQ ID NO:84 or an orthologue thereof.

[0414] Embodiment 402: The composition according to any one of embodiments 317-401, wherein said composition comprises a dsRNA that inhibits or is capable of downregulating expression of the target gene of SEQ ID NO:85 or an orthologue thereof.

[0415] Embodiment 403: The composition according to any one of embodiments 317-402, wherein said composition comprises a dsRNA that inhibits or is capable of downregulating expression of the target gene of SEQ ID NO:86 or an orthologue thereof.

[0416] Embodiment 404: The composition according to any one of embodiments 317-403, wherein said composition comprises a dsRNA that inhibits or is capable of downregulating expression of the target gene of SEQ ID NO:87 or an orthologue thereof.

[0417] Embodiment 405: The composition according to any one of embodiments 317-404, wherein said composition comprises a dsRNA that inhibits or is capable of downregulating expression of the target gene of SEQ ID NO:88 or an orthologue thereof.

[0418] Embodiment 406: The composition according to any one of embodiments 317-405, wherein said composition comprises a dsRNA that inhibits or is capable of downregulating expression of the target gene of SEQ ID NO:89 or an orthologue thereof.

[0419] Embodiment 407: The composition according to any one of embodiments 317-406, wherein said composition comprises a dsRNA that inhibits or is capable of downregulating expression of the target gene of SEQ ID NO:90 or an orthologue thereof.

[0420] Embodiment 408: The composition according to any one of embodiments 317-407, wherein said composition comprises a dsRNA that inhibits or is capable of downregulating expression of the target gene of SEQ ID NO:91 or an orthologue thereof.

[0421] Embodiment 409: The composition according to any one of embodiments 317-408, wherein said composition comprises a dsRNA that inhibits or is capable of downregulating expression of the target gene of SEQ ID NO:92 or an orthologue thereof.

[0422] Embodiment 410: The composition according to any one of embodiments 317-409, wherein said composition comprises a dsRNA that inhibits or is capable of downregulating expression of the target gene of SEQ ID NO:93 or an orthologue thereof.

[0423] Embodiment 411: The composition according to any one of embodiments 317-410, wherein said composition comprises a dsRNA that inhibits or is capable of downregulating expression of the target gene of SEQ ID NO:94 or an orthologue thereof.

[0424] Embodiment 412: The composition according to any one of embodiments 317-411, wherein said composition comprises a dsRNA that inhibits or is capable of downregulating expression of the target gene of SEQ ID NO:95 or an orthologue thereof.

[0425] Embodiment 413: The composition according to any one of embodiments 317-412, wherein said composition comprises a dsRNA that inhibits or is capable of downregulating expression of the target gene of SEQ ID NO:96 or an orthologue thereof.

[0426] Embodiment 414: The composition according to any one of embodiments 317-413, wherein said composition comprises a dsRNA that inhibits or is capable of downregulating expression of the target gene of SEQ ID NO:97 or an orthologue thereof.

[0427] Embodiment 415: The composition according to any one of embodiments 317-414, wherein said composition comprises a dsRNA that inhibits or is capable of downregulating expression of the target gene of SEQ ID NO:98 or an orthologue thereof.

[0428] Embodiment 416: The composition according to any one of embodiments 317-415, wherein said composition comprises a dsRNA that inhibits or is capable of downregulating expression of the target gene of SEQ ID NO:99 or an orthologue thereof.

[0429] Embodiment 417: The composition according to any one of embodiments 317-416, wherein said composition comprises a dsRNA that inhibits or is capable of downregulating expression of the target gene of SEQ ID NO:100 or an orthologue thereof.

[0430] Embodiment 418: The composition according to any one of embodiments 317-417, wherein said composition comprises a dsRNA that inhibits or is capable of downregulating expression of the target gene of SEQ ID NO:101 or an orthologue thereof.

[0431] Embodiment 419: The composition according to any one of embodiments 317-418, wherein said composition comprises a dsRNA that inhibits or is capable of downregulating expression of the target gene of SEQ ID NO:102 or an orthologue thereof.

[0432] Embodiment 420: The composition according to any one of embodiments 317-419, wherein said composition comprises a dsRNA that inhibits or is capable of downregulating expression of the target gene of SEQ ID NO:103 or an orthologue thereof.

[0433] Embodiment 421: The composition according to any one of embodiments 317-420, wherein said composition comprises a dsRNA that inhibits or is capable of downregulating expression of the target gene of SEQ ID NO:104 or an orthologue thereof.

[0434] Embodiment 422: The composition according to any one of embodiments 317-421, wherein said composition comprises a dsRNA that inhibits or is capable of downregulating expression of the target gene of SEQ ID NO:105 or an orthologue thereof.

[0435] Embodiment 423: The composition according to any one of embodiments 317-422, wherein said composition comprises a dsRNA that inhibits or is capable of downregulating expression of the target gene of SEQ ID NO:106 or an orthologue thereof.

[0436] Embodiment 424: The composition according to any one of embodiments 317-423, wherein said composition comprises a dsRNA that inhibits or is capable of downregulating expression of the target gene of SEQ ID NO:107 or an orthologue thereof.

[0437] Embodiment 425: The composition according to any one of embodiments 317-424, wherein said composition comprises a dsRNA that inhibits or is capable of downregulating expression of the target gene of SEQ ID NO:108 or an orthologue thereof.

[0438] Embodiment 426: The composition according to any one of embodiments 317-425, wherein said composition comprises a dsRNA that inhibits or is capable of downregulating expression of the target gene of SEQ ID NO:109 or an orthologue thereof.

[0439] Embodiment 427: The composition according to any one of embodiments 317-426, wherein said composition comprises a dsRNA that inhibits or is capable of downregulating expression of the target gene of SEQ ID NO:110 or an orthologue thereof.

[0440] Embodiment 428: The composition according to any one of embodiments 317-427, wherein said composition comprises a dsRNA that inhibits or is capable of downregulating expression of the target gene of SEQ ID NO:111 or an orthologue thereof.

[0441] Embodiment 429: The composition according to any one of embodiments 317-428, wherein said composition comprises a dsRNA that inhibits or is capable of downregulating expression of the target gene of SEQ ID NO:112 or an orthologue thereof.

[0442] Embodiment 430: The composition according to any one of embodiments 317-429, wherein said composition comprises a dsRNA that inhibits or is capable of downregulating expression of the target gene of SEQ ID NO:113 or an orthologue thereof.

[0443] Embodiment 431: The composition according to any one of embodiments 317-430, wherein said composition comprises a dsRNA that inhibits or is capable of downregulating expression of the target gene of SEQ ID NO:114 or an orthologue thereof.

[0444] Embodiment 432: The composition according to any one of embodiments 317-431, wherein said composition comprises a dsRNA that inhibits or is capable of downregulating expression of the target gene of SEQ ID NO:115 or an orthologue thereof.

[0445] Embodiment 433: The composition according to any one of embodiments 317-432, wherein said composition comprises a dsRNA that inhibits or is capable of downregulating expression of the target gene of SEQ ID NO:116 or an orthologue thereof.

[0446] Embodiment 434: The composition according to any one of embodiments 317-433, wherein said composition comprises a dsRNA that inhibits or is capable of downregulating expression of the target gene of SEQ ID NO:117 or an orthologue thereof.

[0447] Embodiment 435: The composition according to any one of embodiments 317-434, wherein said composition comprises a dsRNA that inhibits or is capable of downregulating expression of the target gene of SEQ ID NO:118 or an orthologue thereof.

[0448] Embodiment 436: The composition according to any one of embodiments 317-435, wherein said composition comprises a dsRNA that inhibits or is capable of downregulating expression of the target gene of SEQ ID NO:119 or an orthologue thereof.

[0449] Embodiment 437: The composition according to any one of embodiments 317-436, wherein said composition comprises a dsRNA that inhibits or is capable of downregulating expression of the target gene of SEQ ID NO:120 or an orthologue thereof.

[0450] Embodiment 438: The composition according to any one of embodiments 317-437, wherein said composition comprises a dsRNA that inhibits or is capable of downregulating expression of the target gene of SEQ ID NO:121 or an orthologue thereof.

[0451] Embodiment 439: The composition according to any one of embodiments 317-438, wherein said composition comprises a dsRNA that inhibits or is capable of downregulating expression of the target gene of SEQ ID NO:122 or an orthologue thereof.

[0452] Embodiment 440: The composition according to any one of embodiments 317-439, wherein said composition comprises a dsRNA that inhibits or is capable of downregulating expression of the target gene of SEQ ID NO:123 or an orthologue thereof.

[0453] Embodiment 441: The composition according to any one of embodiments 317-440, wherein said composition comprises a dsRNA that inhibits or is capable of downregulating expression of the target gene of SEQ ID NO:124 or an orthologue thereof.

[0454] Embodiment 442: The composition according to any one of embodiments 317-441, wherein said composition comprises a dsRNA that inhibits or is capable of downregulating expression of the target gene of SEQ ID NO:125 or an orthologue thereof.

[0455] Embodiment 443: The composition according to any one of embodiments 317-442, wherein said composition comprises a dsRNA that inhibits or is capable of downregulating expression of the target gene of SEQ ID NO:126 or an orthologue thereof.

[0456] Embodiment 444: The composition according to any one of embodiments 317-443, wherein said composition comprises a dsRNA that inhibits or is capable of downregulating expression of the target gene of SEQ ID NO:127 or an orthologue thereof.

[0457] Embodiment 445: The composition according to any one of embodiments 317-444, wherein said composition comprises a dsRNA that inhibits or is capable of downregulating expression of the target gene of SEQ ID NO:128 or an orthologue thereof.

[0458] Embodiment 446: The composition according to any one of embodiments 317-445, wherein said composition comprises a dsRNA that inhibits or is capable of downregulating expression of the target gene of SEQ ID NO:129 or an orthologue thereof.

[0459] Embodiment 447: The composition according to any one of embodiments 317-446, wherein said composition comprises a dsRNA that inhibits or is capable of downregulating expression of the target gene of SEQ ID NO:130 or an orthologue thereof.

[0460] Embodiment 448: The composition according to any one of embodiments 317-447, wherein said composition comprises a dsRNA that inhibits or is capable of downregulating expression of the target gene of SEQ ID NO:131 or an orthologue thereof.

[0461] Embodiment 449: The composition according to any one of embodiments 317-448, wherein said composition comprises a dsRNA that inhibits or is capable of downregulating expression of the target gene of SEQ ID NO:132 or an orthologue thereof.

[0462] Embodiment 450: The composition according to any one of embodiments 317-449, wherein said composition comprises a dsRNA that inhibits or is capable of downregulating expression of the target gene of SEQ ID NO:133 or an orthologue thereof.

[0463] Embodiment 451: The composition according to any one of embodiments 317-450, wherein said composition comprises a dsRNA that inhibits or is capable of downregulating expression of the target gene of SEQ ID NO:134 or an orthologue thereof.

[0464] Embodiment 452: The composition according to any one of embodiments 317-451, wherein said composition comprises a dsRNA that inhibits or is capable of downregulating expression of the target gene of SEQ ID NO:135 or an orthologue thereof.

[0465] Embodiment 453: The composition according to any one of embodiments 317-452, wherein said composition comprises a dsRNA that inhibits or is capable of downregulating expression of the target gene of SEQ ID NO:136 or an orthologue thereof.

[0466] Embodiment 454: The composition according to any one of embodiments 317-453, wherein said composition comprises a dsRNA that inhibits or is capable of downregulating expression of the target gene of SEQ ID NO:137 or an orthologue thereof.

[0467] Embodiment 455: The composition according to any one of embodiments 317-454, wherein said composition comprises a dsRNA that inhibits or is capable of downregulating expression of the target gene of SEQ ID NO:138 or an orthologue thereof.

[0468] Embodiment 456: The composition according to any one of embodiments 317-455, wherein said composition comprises a dsRNA that inhibits or is capable of downregulating expression of the target gene of SEQ ID NO:139 or an orthologue thereof.

[0469] Embodiment 457: The composition according to any one of embodiments 317-456, wherein said composition comprises a dsRNA that inhibits or is capable of downregulating expression of the target gene of SEQ ID NO:140 or an orthologue thereof.

[0470] Embodiment 458: The composition according to any one of embodiments 317-457, wherein said composition comprises a dsRNA that inhibits or is capable of downregulating expression of the target gene of SEQ ID NO:141 or an orthologue thereof.

[0471] Embodiment 459: The composition according to any one of embodiments 317-458, wherein said composition comprises a dsRNA that inhibits or is capable of downregulating expression of the target gene of SEQ ID NO:142 or an orthologue thereof.

[0472] Embodiment 460: The composition according to any one of embodiments 317-459, wherein said composition comprises a dsRNA that inhibits or is capable of downregulating expression of the target gene of SEQ ID NO:143 or an orthologue thereof.

[0473] Embodiment 461: The composition according to any one of embodiments 317-460, wherein said composition comprises a dsRNA that inhibits or is capable of downregulating expression of the target gene of SEQ ID NO:144 or an orthologue thereof.

[0474] Embodiment 462: The composition according to any one of embodiments 317-461, wherein said composition comprises a dsRNA that inhibits or is capable of downregulating expression of the target gene of SEQ ID NO:145 or an orthologue thereof.

[0475] Embodiment 463: The composition according to any one of embodiments 317-462, wherein said composition comprises a dsRNA that inhibits or is capable of downregulating expression of the target gene of SEQ ID NO:146 or an orthologue thereof.

[0476] Embodiment 464: The composition according to any one of embodiments 317-463, wherein said composition comprises a dsRNA that inhibits or is capable of downregulating expression of the target gene of SEQ ID NO:147 or an orthologue thereof.

[0477] Embodiment 465: The composition according to any one of embodiments 317-464, wherein said composition comprises a dsRNA that inhibits or is capable of downregulating expression of the target gene of SEQ ID NO:148 or an orthologue thereof.

[0478] Embodiment 466: The composition according to any one of embodiments 317-465, wherein said composition comprises a dsRNA that inhibits or is capable of downregulating expression of the target gene of SEQ ID NO:149 or an orthologue thereof.

[0479] Embodiment 467: The composition according to any one of embodiments 317-466, wherein said composition comprises a dsRNA that inhibits or is capable of downregulating expression of the target gene of SEQ ID NO:150 or an orthologue thereof.

[0480] Embodiment 468: The composition according to any one of embodiments 317-467, wherein said composition comprises a dsRNA that inhibits or is capable of downregulating expression of the target gene of SEQ ID NO:151 or an orthologue thereof.

[0481] Embodiment 469: The composition according to any one of embodiments 317-468, wherein said composition comprises a dsRNA that inhibits or is capable of downregulating expression of the target gene of SEQ ID NO:152 or an orthologue thereof.

[0482] Embodiment 470: The composition according to any one of embodiments 317-469, wherein said composition comprises a dsRNA that inhibits or is capable of downregulating expression of the target gene of SEQ ID NO:153 or an orthologue thereof.

[0483] Embodiment 471: The composition according to any one of embodiments 317-470, wherein said composition comprises a dsRNA that inhibits or is capable of downregulating expression of the target gene of SEQ ID NO:154 or an orthologue thereof.

[0484] Embodiment 472: The composition according to any one of embodiments 317-471, wherein said composition comprises a dsRNA that inhibits or is capable of downregulating expression of the target gene of SEQ ID NO:155 or an orthologue thereof.

[0485] Embodiment 473: The composition according to any one of embodiments 317-472, wherein said composition comprises a dsRNA that inhibits or is capable of downregulating expression of the target gene of SEQ ID NO:156 or an orthologue thereof.

[0486] Embodiment 474: The composition according to any one of embodiments 317-473, wherein said composition comprises a dsRNA that inhibits or is capable of downregulating expression of the target gene of SEQ ID NO:157 or an orthologue thereof.

[0487] Embodiment 475: The composition according to any one of embodiments 317-474, wherein said composition comprises a dsRNA that inhibits or is capable of downregulating expression of the target gene of SEQ ID NO:158 or an orthologue thereof.

[0488] Embodiment 476: The composition according to any one of embodiments 317-475, wherein said composition comprises a dsRNA that inhibits or is capable of downregulating expression of the target gene of SEQ ID NO:159 or an orthologue thereof.

[0489] Embodiment 477: The composition according to any one of embodiments 317-476, wherein said composition comprises a dsRNA that inhibits or is capable of downregulating expression of the target gene of SEQ ID NO:160 or an orthologue thereof.

[0490] Embodiment 478: The composition according to any one of embodiments 317-477, wherein said composition comprises a dsRNA that inhibits or is capable of downregulating expression of the target gene of SEQ ID NO:161 or an orthologue thereof.

[0491] Embodiment 479: The composition according to any one of embodiments 317-478, wherein said composition comprises a dsRNA that inhibits or is capable of downregulating expression of the target gene of SEQ ID NO:162 or an orthologue thereof.

[0492] Embodiment 480: The composition according to any one of embodiments 317-479, wherein said composition comprises a dsRNA that inhibits or is capable of downregulating expression of the target gene of SEQ ID NO:163 or an orthologue thereof.

[0493] Embodiment 481: The composition according to any one of embodiments 317-480, wherein said composition comprises a dsRNA that inhibits or is capable of downregulating expression of the target gene of SEQ ID NO:164 or an orthologue thereof.

[0494] Embodiment 482: The composition according to any one of embodiments 317-481, wherein said composition comprises a dsRNA that inhibits or is capable of downregulating expression of the target gene of SEQ ID NO:165 or an orthologue thereof.

[0495] Embodiment 483: The composition according to any one of embodiments 317-482, wherein said composition comprises a dsRNA that inhibits or is capable of downregulating expression of the target gene of SEQ ID NO:166 or an orthologue thereof.

[0496] Embodiment 484: The composition according to any one of embodiments 317-483, wherein said composition comprises a dsRNA that inhibits or is capable of downregulating expression of the target gene of SEQ ID NO:167 or an orthologue thereof.

[0497] Embodiment 485: The composition according to any one of embodiments 317-484, wherein said composition comprises a dsRNA that inhibits or is capable of downregulating expression of the target gene of SEQ ID NO:168 or an orthologue thereof.

[0498] Embodiment 486: The composition according to any one of embodiments 317-485, wherein said composition comprises a dsRNA that inhibits or is capable of downregulating expression of the target gene of SEQ ID NO:169 or an orthologue thereof.

[0499] Embodiment 487: The composition according to any one of embodiments 317-486, wherein said composition comprises a dsRNA that inhibits or is capable of downregulating expression of the target gene of SEQ ID NO:170 or an orthologue thereof.

[0500] Embodiment 488: The composition according to any one of embodiments 317-487, wherein said composition comprises a dsRNA that inhibits or is capable of downregulating expression of the target gene of SEQ ID NO:171 or an orthologue thereof.

[0501] Embodiment 489: The composition according to any one of embodiments 317-488, wherein said composition comprises a dsRNA that inhibits or is capable of downregulating expression of the target gene of SEQ ID NO:172 or an orthologue thereof.

[0502] Embodiment 490: The composition according to any one of embodiments 317-489, wherein said composition comprises a dsRNA that inhibits or is capable of downregulating expression of the target gene of SEQ ID NO:173 or an orthologue thereof.

[0503] Embodiment 491: The composition according to any one of embodiments 317-490, wherein said composition comprises a dsRNA that inhibits or is capable of downregulating expression of the target gene of SEQ ID NO:174 or an orthologue thereof.

[0504] Embodiment 492: The composition according to any one of embodiments 317-491, wherein said composition comprises a dsRNA that inhibits or is capable of downregulating expression of the target gene of SEQ ID NO:175 or an orthologue thereof.

[0505] Embodiment 493: The composition according to any one of embodiments 317-492, wherein said composition comprises a dsRNA that inhibits or is capable of downregulating expression of the target gene of SEQ ID NO:176 or an orthologue thereof.

[0506] Embodiment 494: The composition according to any one of embodiments 317-493, wherein said composition comprises a dsRNA that inhibits or is capable of downregulating expression of the target gene of SEQ ID NO:177 or an orthologue thereof.

[0507] Embodiment 495: The composition according to any one of embodiments 317-494, wherein said composition comprises a dsRNA that inhibits or is capable of downregulating expression of the target gene of SEQ ID NO:178 or an orthologue thereof.

[0508] Embodiment 496: The composition according to any one of embodiments 317-495, wherein said composition comprises a dsRNA that inhibits or is capable of downregulating expression of the target gene of SEQ ID NO:179 or an orthologue thereof.

[0509] Embodiment 497: The composition according to any one of embodiments 317-496, wherein said composition comprises a dsRNA that inhibits or is capable of downregulating expression of the target gene of SEQ ID NO:180 or an orthologue thereof.

[0510] Embodiment 498: The composition according to any one of embodiments 317-497, wherein said composition comprises a dsRNA that inhibits or is capable of downregulating expression of the target gene of SEQ ID NO:181 or an orthologue thereof.

[0511] Embodiment 499: The composition according to any one of embodiments 317-498, wherein said composition comprises a dsRNA that inhibits or is capable of downregulating expression of the target gene of SEQ ID NO:182 or an orthologue thereof.

[0512] Embodiment 500: The composition according to any one of embodiments 317-499, wherein said composition comprises a dsRNA that inhibits or is capable of downregulating expression of the target gene of SEQ ID NO:183 or an orthologue thereof.

[0513] Embodiment 501: The composition according to any one of embodiments 317-500, wherein said composition comprises a dsRNA that inhibits or is capable of downregulating expression of the target gene of SEQ ID NO:184 or an orthologue thereof.

[0514] Embodiment 502: The composition according to any one of embodiments 317-501, wherein said composition comprises a dsRNA that inhibits or is capable of downregulating expression of the target gene of SEQ ID NO:185 or an orthologue thereof.

[0515] Embodiment 503: The composition according to any one of embodiments 317-502, wherein said composition comprises a dsRNA that inhibits or is capable of downregulating expression of the target gene of SEQ ID NO:186 or an orthologue thereof.

[0516] Embodiment 504: The composition according to any one of embodiments 317-503, wherein said composition comprises a dsRNA that inhibits or is capable of downregulating expression of the target gene of SEQ ID NO:187 or an orthologue thereof.

[0517] Embodiment 505: The composition according to any one of embodiments 317-504, wherein said composition comprises a dsRNA that inhibits or is capable of downregulating expression of the target gene of SEQ ID NO:188 or an orthologue thereof.

[0518] Embodiment 506: The composition according to any one of embodiments 317-505, wherein said composition comprises a dsRNA that inhibits or is capable of downregulating expression of the target gene of SEQ ID NO:189 or an orthologue thereof.

[0519] Embodiment 507: The composition according to any one of embodiments 317-506, wherein said composition comprises a dsRNA that inhibits or is capable of downregulating expression of the target gene of SEQ ID NO:190 or an orthologue thereof.

[0520] Embodiment 508: The composition according to any one of embodiments 317-507, wherein said composition comprises a dsRNA that inhibits or is capable of downregulating expression of the target gene of SEQ ID NO:191 or an orthologue thereof.

[0521] Embodiment 509: The composition according to any one of embodiments 317-508, wherein said composition comprises a dsRNA that inhibits or is capable of downregulating expression of the target gene of SEQ ID NO:192 or an orthologue thereof.

[0522] Embodiment 510: The composition according to any one of embodiments 317-509, wherein said composition comprises a dsRNA that inhibits or is capable of downregulating expression of the target gene of SEQ ID NO:193 or an orthologue thereof.

[0523] Embodiment 511: The composition according to any one of embodiments 317-510, wherein said composition comprises a dsRNA that inhibits or is capable of downregulating expression of the target gene of SEQ ID NO:194 or an orthologue thereof.

[0524] Embodiment 512: The composition according to any one of embodiments 317-511, wherein said composition comprises a dsRNA that inhibits or is capable of downregulating expression of the target gene of SEQ ID NO:195 or an orthologue thereof.

[0525] Embodiment 513: The composition according to any one of embodiments 317-512, wherein said composition comprises a dsRNA that inhibits or is capable of downregulating expression of the target gene of SEQ ID NO:196 or an orthologue thereof.

[0526] Embodiment 514: The composition according to any one of embodiments 317-513, wherein said composition comprises a dsRNA that inhibits or is capable of downregulating expression of the target gene of SEQ ID NO:197 or an orthologue thereof.

[0527] Embodiment 515: The composition according to any one of embodiments 317-514, wherein said composition comprises a dsRNA that inhibits or is capable of downregulating expression of the target gene of SEQ ID NO:198 or an orthologue thereof.

[0528] Embodiment 516: The composition according to any one of embodiments 317-515, wherein said composition comprises a dsRNA that inhibits or is capable of downregulating expression of the target gene of SEQ ID NO:199 or an orthologue thereof.

[0529] Embodiment 517: The composition according to any one of embodiments 317-516, wherein said composition comprises a dsRNA that inhibits or is capable of downregulating expression of the target gene of SEQ ID NO:200 or an orthologue thereof.

[0530] Embodiment 518: The composition according to any one of embodiments 317-517, wherein said composition comprises a dsRNA that inhibits or is capable of downregulating expression of the target gene of SEQ ID NO:201 or an orthologue thereof.

[0531] Embodiment 519: The composition according to any one of embodiments 317-518, wherein said composition comprises a dsRNA that inhibits or is capable of downregulating expression of the target gene of SEQ ID NO:202 or an orthologue thereof.

[0532] Embodiment 520: The composition according to any one of embodiments 317-519, wherein said composition comprises a dsRNA that inhibits or is capable of downregulating expression of the target gene of SEQ ID NO:203 or an orthologue thereof.

[0533] Embodiment 521: The composition according to any one of embodiments 317-520, wherein said composition comprises a dsRNA that inhibits or is capable of downregulating expression of the target gene of SEQ ID NO:204 or an orthologue thereof.

[0534] Embodiment 522: The composition according to any one of embodiments 317-521, wherein said composition comprises a dsRNA that inhibits or is capable of downregulating expression of the target gene of SEQ ID NO:205 or an orthologue thereof.

[0535] Embodiment 523: The composition according to any one of embodiments 317-522, wherein said composition comprises a dsRNA that inhibits or is capable of downregulating expression of the target gene of SEQ ID NO:206 or an orthologue thereof.

[0536] Embodiment 524: The composition according to any one of embodiments 317-523, wherein said composition comprises a dsRNA that inhibits or is capable of downregulating expression of the target gene of SEQ ID NO:207 or an orthologue thereof.

[0537] Embodiment 525: The composition according to any one of embodiments 317-524, wherein said composition comprises a dsRNA that inhibits or is capable of downregulating expression of the target gene of SEQ ID NO:208 or an orthologue thereof.

[0538] Embodiment 526: The composition according to any one of embodiments 317-525, wherein said composition comprises a dsRNA that inhibits or is capable of downregulating expression of the target gene of SEQ ID NO:209 or an orthologue thereof.

[0539] Embodiment 527: The composition according to any one of embodiments 317-526, wherein said composition comprises a dsRNA that inhibits or is capable of downregulating expression of the target gene of SEQ ID NO:210 or an orthologue thereof.

[0540] Embodiment 528: The composition according to any one of embodiments 317-527, wherein said composition comprises a dsRNA that inhibits or is capable of downregulating expression of the target gene of SEQ ID NO:211 or an orthologue thereof.

[0541] Embodiment 529: The composition of embodiment 314, wherein said composition comprises two or more dsRNAs comprising nucleotide sequences corresponding to (encoded by) a sequences independently elected from the group consisting of SEQ ID NO:212, SEQ ID NO:213, SEQ ID NO:214, SEQ ID NO:215, SEQ ID NO:216, SEQ ID NO:217, SEQ ID NO:218, SEQ ID NO:219, SEQ ID NO:220, SEQ ID NO:221, SEQ ID NO:222, SEQ ID NO:223, SEQ ID NO:224, SEQ ID NO:225, SEQ ID NO:226, SEQ ID NO:227, SEQ ID NO:228, SEQ ID NO:229, SEQ ID NO:230, SEQ ID NO:231, SEQ ID NO:232, SEQ ID NO:233, SEQ ID NO:234, SEQ ID NO:235, SEQ ID NO:236, SEQ ID NO:237, SEQ ID NO:238, SEQ ID NO:239, SEQ ID NO:240, SEQ ID NO:241, SEQ ID NO:242, SEQ ID NO:243, SEQ ID NO:244, SEQ ID NO:245, SEQ ID NO:246, SEQ ID NO:247, SEQ ID NO:248, SEQ ID NO:249, SEQ ID NO:250, SEQ ID NO:251, SEQ ID NO:252, SEQ ID NO:253, SEQ ID NO:254, SEQ ID NO: and SEQ ID NO:255.

[0542] Embodiment 530: The composition of embodiment 529, wherein said dsRNA comprises a nucleotide sequence corresponding to (encoded by) the sequence of SEQ ID NO:212.

[0543] Embodiment 531: The composition according to any one of embodiments 529-530, wherein said dsRNA comprises a nucleotide sequence corresponding to (encoded by) the sequence of SEQ ID NO:213.

[0544] Embodiment 532: The composition according to any one of embodiments 529-531, wherein said dsRNA comprises a nucleotide sequence corresponding to (encoded by) the sequence of SEQ ID NO:214.

[0545] Embodiment 533: The composition according to any one of embodiments 529-532, wherein said dsRNA comprises a nucleotide sequence corresponding to (encoded by) the sequence of SEQ ID NO:215.

[0546] Embodiment 534: The composition according to any one of embodiments 529-533, wherein said dsRNA comprises a nucleotide sequence corresponding to (encoded by) the sequence of SEQ ID NO:216.

[0547] Embodiment 535: The composition according to any one of embodiments 529-534, wherein said dsRNA comprises a nucleotide sequence corresponding to (encoded by) the sequence of SEQ ID NO:217.

[0548] Embodiment 536: The composition according to any one of embodiments 529-535, wherein said dsRNA comprises a nucleotide sequence corresponding to (encoded by) the sequence of SEQ ID NO:218.

[0549] Embodiment 537: The composition according to any one of embodiments 529-536, wherein said dsRNA comprises a nucleotide sequence corresponding to (encoded by) the sequence of SEQ ID NO:219.

[0550] Embodiment 538: The composition according to any one of embodiments 529-537, wherein said dsRNA comprises a nucleotide sequence corresponding to (encoded by) the sequence of SEQ ID NO:220.

[0551] Embodiment 539: The composition according to any one of embodiments 529-538, wherein said dsRNA comprises a nucleotide sequence corresponding to (encoded by) the sequence of SEQ ID NO:221.

[0552] Embodiment 540: The composition according to any one of embodiments 529-539, wherein said dsRNA comprises a nucleotide sequence corresponding to (encoded by) the sequence of SEQ ID NO:222.

[0553] Embodiment 541: The composition according to any one of embodiments 529-540, wherein said dsRNA comprises a nucleotide sequence corresponding to (encoded by) the sequence of SEQ ID NO:223.

[0554] Embodiment 542: The composition according to any one of embodiments 529-541, wherein said dsRNA comprises a nucleotide sequence corresponding to (encoded by) the sequence of SEQ ID NO:224.

[0555] Embodiment 543: The composition according to any one of embodiments 529-542, wherein said dsRNA comprises a nucleotide sequence corresponding to (encoded by) the sequence of SEQ ID NO:225.

[0556] Embodiment 544: The composition according to any one of embodiments 529-543, wherein said dsRNA comprises a nucleotide sequence corresponding to (encoded by) the sequence of SEQ ID NO:226.

[0557] Embodiment 545: The composition according to any one of embodiments 529-544, wherein said dsRNA comprises a nucleotide sequence corresponding to (encoded by) the sequence of SEQ ID NO:227.

[0558] Embodiment 546: The composition according to any one of embodiments 529-545, wherein said dsRNA comprises a nucleotide sequence corresponding to (encoded by) the sequence of SEQ ID NO:228.

[0559] Embodiment 547: The composition according to any one of embodiments 529-546, wherein said dsRNA comprises a nucleotide sequence corresponding to (encoded by) the sequence of SEQ ID NO:229.

[0560] Embodiment 548: The composition according to any one of embodiments 529-547, wherein said dsRNA comprises a nucleotide sequence corresponding to (encoded by) the sequence of SEQ ID NO:230.

[0561] Embodiment 549: The composition according to any one of embodiments 529-548, wherein said dsRNA comprises a nucleotide sequence corresponding to (encoded by) the sequence of SEQ ID NO:231.

[0562] Embodiment 550: The composition according to any one of embodiments 529-549, wherein said dsRNA comprises a nucleotide sequence corresponding to (encoded by) the sequence of SEQ ID NO:232.

[0563] Embodiment 551: The composition according to any one of embodiments 529-550, wherein said dsRNA comprises a nucleotide sequence corresponding to (encoded by) the sequence of SEQ ID NO:233.

[0564] Embodiment 552: The composition according to any one of embodiments 529-551, wherein said dsRNA comprises a nucleotide sequence corresponding to (encoded by) the sequence of SEQ ID NO:234.

[0565] Embodiment 553: The composition according to any one of embodiments 529-552, wherein said dsRNA comprises a nucleotide sequence corresponding to (encoded by) the sequence of SEQ ID NO:235.

[0566] Embodiment 554: The composition according to any one of embodiments 529-553, wherein said dsRNA comprises a nucleotide sequence corresponding to (encoded by) the sequence of SEQ ID NO:236.

[0567] Embodiment 555: The composition according to any one of embodiments 529-554, wherein said dsRNA comprises a nucleotide sequence corresponding to (encoded by) the sequence of SEQ ID NO:237.

[0568] Embodiment 556: The composition according to any one of embodiments 529-555, wherein said dsRNA comprises a nucleotide sequence corresponding to (encoded by) the sequence of SEQ ID NO:238.

[0569] Embodiment 557: The composition according to any one of embodiments 529-556, wherein said dsRNA comprises a nucleotide sequence corresponding to (encoded by) the sequence of SEQ ID NO:239.

[0570] Embodiment 558: The composition according to any one of embodiments 529-557, wherein said dsRNA comprises a nucleotide sequence corresponding to (encoded by) the sequence of SEQ ID NO:240.

[0571] Embodiment 559: The composition according to any one of embodiments 529-558, wherein said dsRNA comprises a nucleotide sequence corresponding to (encoded by) the sequence of SEQ ID NO:241.

[0572] Embodiment 560: The composition according to any one of embodiments 529-559, wherein said dsRNA comprises a nucleotide sequence corresponding to (encoded by) the sequence of SEQ ID NO:242.

[0573] Embodiment 561: The composition according to any one of embodiments 529-560, wherein said dsRNA comprises a nucleotide sequence corresponding to (encoded by) the sequence of SEQ ID NO:243.

[0574] Embodiment 562: The composition according to any one of embodiments 529-561, wherein said dsRNA comprises a nucleotide sequence corresponding to (encoded by) the sequence of SEQ ID NO:244.

[0575] Embodiment 563: The composition according to any one of embodiments 529-562, wherein said dsRNA comprises a nucleotide sequence corresponding to (encoded by) the sequence of SEQ ID NO:245.

[0576] Embodiment 564: The composition according to any one of embodiments 529-563, wherein said dsRNA comprises a nucleotide sequence corresponding to (encoded by) the sequence of SEQ ID NO:246.

[0577] Embodiment 565: The composition according to any one of embodiments 529-564, wherein said dsRNA comprises a nucleotide sequence corresponding to (encoded by) the sequence of SEQ ID NO:247.

[0578] Embodiment 566: The composition according to any one of embodiments 529-565, wherein said dsRNA comprises a nucleotide sequence corresponding to (encoded by) the sequence of SEQ ID NO:248.

[0579] Embodiment 567: The composition according to any one of embodiments 529-566, wherein said dsRNA comprises a nucleotide sequence corresponding to (encoded by) the sequence of SEQ ID NO:249.

[0580] Embodiment 568: The composition according to any one of embodiments 529-567, wherein said dsRNA comprises a nucleotide sequence corresponding to (encoded by) the sequence of SEQ ID NO:250.

[0581] Embodiment 569: The composition according to any one of embodiments 529-568, wherein said dsRNA comprises a nucleotide sequence corresponding to (encoded by) the sequence of SEQ ID NO:251.

[0582] Embodiment 570: The composition according to any one of embodiments 529-569, wherein said dsRNA comprises a nucleotide sequence corresponding to (encoded by) the sequence of SEQ ID NO:252.

[0583] Embodiment 571: The composition according to any one of embodiments 529-570, wherein said dsRNA comprises a nucleotide sequence corresponding to (encoded by) the sequence of SEQ ID NO:253.

[0584] Embodiment 572: The composition according to any one of embodiments 529-571, wherein said dsRNA comprises a nucleotide sequence corresponding to (encoded by) the sequence of SEQ ID NO:254.

[0585] Embodiment 573: The composition according to any one of embodiments 529-572, wherein said dsRNA comprises a nucleotide sequence corresponding to (encoded by) the sequence of SEQ ID NO:255.

[0586] Embodiment 574: The composition according to any one of embodiments 314-573, wherein said composition is formulated for spray on application to a plant.

[0587] Embodiment 575: The composition according to any one of embodiments 314-574, wherein said composition is provided as a spray, a drench, granules, a seed coating, inoculation in plant growth medium, as a mist or fog, injection in stem or other plant parts or as a plant-incorporated protectant.

[0588] Embodiment 576: The composition of embodiment 575, wherein said composition is provided as a spray, a drenche, granules, a seed coating, or a plant-incorporated protectant.

[0589] Embodiment 577: The composition according to any one of embodiments 314-574, wherein said composition is formulated for use in drip irrigation.

[0590] Embodiment 578: The composition according to any one of embodiments 314-576, wherein said composition comprises said dsRNA(s) associated with a particle or nanoparticle.

[0591] Embodiment 579: The composition of embodiment 578, wherein said particle or nanoparticle comprise a clay or polymer.

[0592] Embodiment 580: The composition of embodiment 579, wherein said polymer is an inorganic or organic polymer.

[0593] Embodiment 581: The composition of embodiment 582, wherein the organic polymer is a chitosan or chitosan-derived polymer.

[0594] Embodiment 582: The composition according to any one of embodiments 314-576, wherein said composition comprises said dsRNA(s) incorporated into a lipid or liposome.

[0595] Embodiment 583: The composition according to any one of embodiments 314-576, wherein said composition comprises said dsRNA(s) are incorporated into an anucleated cell.

[0596] Embodiment 584: The composition according to any one of embodiments 314-576, wherein said composition is provided as a component of a microbial cell or microbial fermentation product.

[0597] Embodiment 585: The composition according to any one of embodiments 314-584, wherein said composition further comprises at least one additive from the group consisting of adjuvants, attractants, growth-regulating substances, insect feed, pheromones, proteins, carbohydrates, polymers, organic compounds, biologics, biostimulants, other biological or synthetic pesticidal agents, and other biological or synthetic growth-regulating agents.

[0598] Embodiment 586: The composition according to any one of embodiments 314-576, wherein said dsRNA(s) comprise a lyophilized powder.

[0599] Embodiment 587: The composition according to any one of embodiments 314-576, wherein said dsRNA(s) comprise a solution or suspension.

[0600] Embodiment 588: The composition according to any one of embodiments 314-576, wherein said dsRNA(s) is formulated for injection into a part of a host plant.

[0601] Embodiment 589: The composition according to any one of embodiments 314-590, wherein the concentration of dsRNA in said composition ranges from about 1 μg/mL, or from about 5 μg/mL, or from about 10 μg/mL, or from about 15 μg/mL, or from about 20 μg/mL, or from about 25 μg/mL up to about 500 μg/mL, or up to about 400 μg/mL, or up to about 300 μg/mL, or up to about 200 μg/mL, or up to about 100 μg/mL, or up to about 80 μg/mL.

[0602] Embodiment 590: The composition of embodiment 589, wherein the concentration of dsRNA in said composition ranges from about 10 μg/mL up to about 80 μg/mL.

[0603] Embodiment 591: A transgenic plant or a part thereof comprising a transgene, wherein the transgene comprises a DNA that expresses a double stranded RNA (dsRNA) according to any one of embodiments 1-313.

[0604] Embodiment 592: The transgenic plant or a part thereof of embodiment 591, wherein said dsRNA is expressed at a level that reduces spore count of said phytopathogenic fungus compared to a plant without said DNA.

[0605] Embodiment 593: The transgenic plant or a part thereof according to any one of embodiments 591-592, wherein said dsRNA is expressed at a level that reduces hyphal length of said phytopathogenic fungus as compared to a plant without said DNA.

[0606] Embodiment 594: The transgenic plant or a part thereof according to any one of embodiments 591-592, wherein said dsRNA is expressed at a level that reduces germination of said phytopathogenic fungus as compared to a plant without said DNA.

[0607] Embodiment 595: The transgenic plant or a part thereof according to any one of embodiments 591-592, wherein said dsRNA is expressed at a level that reduces penetration of host plant by said phytopathogenic fungus as compared to a plant without said DNA.

[0608] Embodiment 596: The transgenic plant or a part thereof according to any one of embodiments 591-595, wherein the transgene comprises an expression cassette comprising the DNA.

[0609] Embodiment 597: The transgenic plant or the part thereof of embodiment 596, wherein the transgene is stably integrated into the genome of the transgenic plant or the part thereof, or wherein the transgene is present on a vector in the transgenic plant or the part thereof.

[0610] Embodiment 598: The transgenic plant or the part thereof according to any one of embodiments 596-597, wherein the expression of the dsRNA(s) is controlled by a promoter.

[0611] Embodiment 599: The transgenic plant or the part thereof according to any one of embodiments 591-598, wherein said transgenic plant or part thereof comprises a plant or part of a plant selected from the group consisting of grape, wheat, barley, legumes, e.g. soybean, onion, artichoke, apples, peaches, pears, cucurbits, cucumbers, squashes (including pumpkins), luffas, melons, watermelons, hemp, cannabis, roses, strawberry, hops, coffee, oats, ryegrass, a cereal, rice, corn, and sugar cane.

[0612] Embodiment 600: The transgenic plant or the part thereof according to any one of embodiments 591-598, wherein said transgenic plant or part thereof comprises a plant or part of a plant selected from the group consisting of grape, wheat, barley, legumes, e.g. soybean), onion, artichoke, apples, peaches, pears, cucumbers, squashes (including pumpkins), luffas, melons, watermelons, coffee rust, oats, ryegrass, a cereal, corn, and sugar cane.

[0613] Embodiment 601: The transgenic plant or the part thereof of embodiment 599, wherein said transgenic plant or part thereof comprises a grape plant or a grape plant part.

[0614] Embodiment 602: The transgenic plant or the part thereof according to any one of embodiments 591-601, wherein said plant or part thereof comprises a plant.

[0615] Embodiment 603: The transgenic plant or the part thereof according to any one of embodiments 591-601, wherein said plant or part thereof comprise seed.

[0616] Embodiment 604: A DNA encoding double stranded RNA (dsRNA) according to any one of embodiments 1-313.

[0617] Embodiment 605: An expression cassette comprising the DNA of embodiment 604.

[0618] Embodiment 606: A vector comprising (a) the DNA of embodiment 604, or (b) an expression cassette comprising the DNA.

[0619] Embodiment 607: A method of producing the transgenic plant or the part thereof according to any one of embodiments 591-603, said method comprising:
[0620] introducing into at least a cell of the plant:
   [0621] (a) a DNA of embodiment 604; or
   [0622] (b) a dsRNA according to any one of embodiments 1-313; and regenerating the transgenic plant from the at least one cell.

[0623] Embodiment 608: A method of conferring phytopathogenic fungal resistance to a plant or the part thereof, said method comprising:
[0624] introducing into the plant or the part thereof:
   [0625] (a) a DNA of embodiment 604;
   [0626] (b) an expression cassette comprising the DNA of embodiment 604, or
   [0627] (c) a dsRNA according to any one of embodiments 1-313.

[0628] Embodiment 609: A method for controlling or preventing an infection of a plant by a phytopathogenic fungus, said method comprising:
[0629] (a) contacting said plant and/or said pathogenic fungus with an isolated double-stranded RNA according to any one of embodiments 1-313; or
[0630] (b) expressing in said plant at least one isolated double-stranded RNA according to any one of embodiments 1-313.

[0631] Embodiment 610: The method of embodiment 609, wherein said applying contacting comprises spraying, dunking, coating, watering, or irrigating said plant with a composition according to any one of embodiments 314-587.

[0632] Embodiment 611: The method according to any one of embodiments 609-610, wherein said contacting is before infection by said phytopathogenic fungus.

[0633] Embodiment 612: The method according to any one of embodiments 609-610, wherein said contacting is during infection by said phytopathogenic fungus.

[0634] Embodiment 613: The method according to any one of embodiments 609-612, wherein said contacting comprises applying said dsRNA to a plant selected from the group consisting of grape, wheat, barley, legumes, e.g. soybean, onion, artichoke, apples, peaches, pears, cucurbits, cucumbers, squashes (including pumpkins), luffas, melons, watermelons, hemp, cannabis, roses, strawberry, hops, coffee, oats, ryegrass, a cereal, rice, corn, and sugar cane.

[0635] Embodiment 614: The method according to any one of embodiments 609-612, wherein said contacting comprises applying said dsRNA to a plant selected from the group consisting of grape, wheat, barley, legumes, onion, artichoke, apples, peaches, pears, cucumbers, squashes (including pumpkins), luffas, melons, watermelons, coffee rust, oats, ryegrass, a cereal, corn, and sugar cane.

[0636] Embodiment 615: The method of embodiment 609, wherein said expressing in said plant at least one isolated double-stranded RNA comprises providing a transgenic plant according to any one of embodiments 591-603.

[0637] Embodiment 616: The method of embodiment 615, wherein said transgenic comprises a plant selected from the group consisting of grape, wheat, barley, legumes, e.g., soybean, onion, artichoke, apples, peaches, pears, cucurbits, cucumbers, squashes (including pumpkins), luffas, melons, watermelons, hemp, cannabis, roses, strawberry, hops, coffee, oats, ryegrass, a cereal, rice, corn, and sugar cane.

[0638] Embodiment 617: The method of embodiment 615, wherein said transgenic comprises a plant selected from the group consisting of grape, wheat, barley, legumes, onion, artichoke, apples, peaches, pears, cucumbers, squashes (including pumpkins), luffas, melons, watermelons, coffee, oats, ryegrass, a cereal, corn, and sugar cane.

[0639] Embodiment 618: The method of embodiment 613, wherein said plant comprises a grape plant.

[0640] Embodiment 619: The method of embodiment 616, wherein said transgenic plant comprises a grape plant.

[0641] Embodiment 620: The method according to any one of embodiments 618-619, wherein said phytopathogenic fungus comprises Erysiphe necator.

[0642] Embodiment 621: A method of identifying genes in a phytopathogen that when downregulated in said phytopathogen inhibit infection of a host plant by said phytopathogen, said method comprising:
[0643] selecting target gene(s) in the phytopathogen that have ortholog(s) in a reference powdery mildew;
[0644] designing long dsRNA or siRNA to inhibit the reference powdery mildew orthologues with minimal off-targets in the host plant;
[0645] inoculating said host plant with said reference powdery mildew;
[0646] contacting said host plant with said dsRNA and/or siRNA; and
[0647] determining growth and/or reproduction of said reference powdery mildew in said host plant, where reduced growth or reproduction of said reference powdery mildew compared to an untreated plant of the same species indicates that the target genes are phytopathogen genes whose downregulation inhibits infection of said host plant by said phytopathogen.

[0648] Embodiment 622: The method of embodiment 621, wherein said method comprises determining growth and/or reproduction of phytopathogen in said host plant, where reduced growth or reproduction of said phytopathogen compared to an untreated plant of the same species indicates that the target genes are phytopathogen genes whose downregulation inhibits infection of said host plant by said phytopathogen.

[0649] Embodiment 623: The method according to any one of embodiments 621-622, wherein said host plant comprises a grape plant.

[0650] Embodiment 624: The method according to any one of embodiments 621-623, wherein said host plant is Aripsopsis spp.

[0651] Embodiment 625: The method according to any one of embodiments 621-624, wherein said reference powdery mildew is a powdery mildew selected from the group consisting of G. orontii, Erysiphe necator (or Uncinula necator) (powdery mildew of grapes), Erysiphe pisi (powdery mildew of pea), Blumeria graminis f. sp. tritici (causes powdery mildew of wheat), f. sp. hordei (powdery mildew of barley), Microsphaera diffusa (powdery mildew of legumes, e.g. soybean), Leveillula taurica (also known as Oidiopsis taurica) (powdery mildew of onion or artichoke), Podosphaera leucotricha (powdery mildew of apples and pears), Podosphaera macularis (powdery mildew of hemp and cannabis), Podosphaera fusca and Podosphaera xanthii (powdery mildew of cucurbits: cucumbers, squashes (including pumpkins), luffas, melons, and watermelons), Podosphaera pannosa (powdery mildew of roses), and G. cichoracearum (powdery mildew of curcubits).

[0652] Embodiment 626: The method according to any one of embodiments 621-624, wherein said reference powdery mildew is a powdery mildew selected from the group consisting of Golovinomyces orontii, Erysiphe necator, Blumeria graminis f. sp. Tritici, Blumeria graminis f. sp. hordei (powdery mildew of barley), Microsphaera diffusa (powdery mildew of legumes, e.g. soybean), Leveillula taurica (also known as Oidiopsis taurica) (powdery mildew of onion or artichoke), Podosphaera leucotricha (powdery mildew of apples and pears), and Podosphaera xanthii.

[0653] Embodiment 627: The method of embodiment 625, wherein said reference powdery mildew is Golovinomyces orontii.

[0654] Embodiment 628: The method according to any one of embodiments 621-624, wherein said ortholog is an ortholog found in a powdery mildew.

[0655] Embodiment 629: The method of embodiment 628, wherein said ortholog is an ortholog found in a powdery mildew selected from the group consisting of Erysiphe necator (or Uncinula necator) (powdery mildew of grapes), Blumeria graminis f. sp. tritici (causes powdery mildew of wheat), f. sp. hordei (powdery mildew of barley), Microsphaera diffusa (powdery mildew of legumes, e.g. soybean), Leveillula taurica (also known as Oidiopsis taurica) (powdery mildew of onion or artichoke), Podosphaera leucotricha (powdery mildew of apples and pears), and Podosphaera xanthii (powdery mildew of cucurbits: cucumbers, squashes (including pumpkins), luffas, melons, and watermelons).

[0656] Embodiment 630: The method of embodiment 629, wherein said ortholog is an ortholog found in Erysiphe necator (or Uncinula necator).

[0657] Embodiment 631: The method according to any one of embodiments 621-624, wherein said ortholog is an ortholog found in a plant rust.

[0658] Embodiment 632: The method of embodiment 631, wherein said ortholog is an ortholog found in a plant rust selected from the group consisting of Cronartium ribicola (White pine blister rust), Gymnosporangium juniperi-virginianae (Cedar-apple rust), Hemileia vastatrix (Coffee rust), Phakopsora meibomiae and P. pachyrhizi (Soybean rust), Puccinia coronata (Crown Rust of Oats and Ryegrass), Puccinia graminis (Stem rust of wheat and Kentucky bluegrass, or black rust of cereals), Puccinia hemerocallidis (Daylily rust), Puccinia triticina (Brown Wheat Rust), Puccinia sorghi (Common Rust of Corn), Puccinia striiformis (Yellow Rust) of cereals, Uromyces appendiculatus (Bean Rust), Puccinia melanocephala (Brown Rust of Sugarcane), and Puccinia kuehnii (Orange rust of Sugar cane).

[0659] Embodiment 633: The method according to any one of embodiments 621-624, wherein said ortholog is an ortholog found in an ascomycete selected from the group consisting of Fusarium spp. (Fusarium wilt disease), Thielaviopsis spp. (canker rot, black root rot, Thielaviopsis root rot), Verticillium spp., Magnaporthe grisea (rice blast), Botrytis spp. (grey mold), and Sclerotinia sclerotiorum (cottony rot).

[0660] Embodiment 634: The method according to any one of embodiments 621-624, wherein said ortholog is an ortholog found in a Basidiomycete selected from the group consisting of Ustilago spp. (smuts) smut of barley, Rhizoctonia spp., and Armillaria spp. (honey fungus species, virulent pathogens of trees).

[0661] Embodiment 635: The method according to any one of embodiments 621-634, wherein said ortholog shares at least 35% sequence identify, or at least 40% sequence identity, or at least 50% sequence identity, or at least 60% sequence identity, or at least 70% sequence identity, or at least 80% sequence identity, or at least 85% sequence identity, or at least 90% sequence identity, or at least 95% sequence identity with the corresponding G. orontii gene.

[0662] Embodiment 636: The method according to any one of embodiments 621-635, wherein said ortholog encodes a protein that shares at least 50% sequence identity, or at least 60% sequence identity, or at least 70% sequence identity, or at least 80% sequence identity, or at least 85% sequence identity, or at least 90% sequence identity, or at least 95% sequence identity, or at least 98% sequence identity with a protein expressed by the corresponding G. orontii gene.

[0663] Embodiment 637: The method according to any one of embodiments 621-636, wherein said determining growth and/or reproduction comprises counting spore production and/or determining hyphal length and/or determining spore germination, and/or determining penetration of host plant, and/or visual disease symptoms, and/or quantification of pathogen DNA or RNA.

[0664] Embodiment 638: The method according to any one of embodiments 621-636, wherein said determining growth and/or reproduction comprises counting spore production and/or determining hyphal length.

[0665] Embodiment 639: The method according to any one of embodiments 621-636, wherein said determining growth and/or reproduction comprises counting spore production and/or determining hyphal length and/or visual disease symptoms.

[0666] Embodiment 640: In any of the forgoing embodiments, the target genes or groups of target genes expressly omit CYP51 (SEQ ID NO:85).

### Definitions

[0667] The terms “polynucleotide” and “nucleic acid,” used interchangeably herein, refer to a polymeric form of nucleotides of any length, either ribonucleotides or deoxynucleotides. Thus, this term includes, but is not limited to, single-, double-, or multi-stranded DNA or RNA, genomic DNA, cDNA, DNA-RNA hybrids, or a polymer comprising purine and pyrimidine bases or other natural, chemically or biochemically modified, non-natural, or derivatized nucleotide bases. The terms “polynucleotide” and “nucleic acid” should be understood to include, as applicable to the embodiment being described, single-stranded (such as sense or antisense) and double-stranded polynucleotides. In various embodiments, the polynucleotides may comprise heterocyclic nucleosides consisting of purines and the pyrimidines bases, bonded in a 3′ to 5′ phosphodiester linkage. In certain embodiments, polynucleotides may be modified in backbone, and/or internucleotide linkages, and/or bases, e.g., as described hereinunder. Specific examples of polynucleotides include polynucleotide agents containing modified backbones or non-natural internucleoside linkages. Polynucleotide agents having modified backbones include those that retain a phosphorus atom in the backbone, as disclosed in U.S. Pat. Nos. 4,469,863; 4,476,301; 5,023,243; 5,177,196; 5,188,897; 5,264,423; 5,276,019; 5,278,302; 5,286,717; 5,321,131; 5,399,676; 5,405,939; 5,453,496; 5,455,233; 5,466,677; 5,476,925; 5,519,126; 5,536,821; 5,541,306; 5,550,111; 5,563,253; 5,571,799; 5,587,361; and 5,625,050. Other modified polynucleotide backbones include, for example, phosphorothioates, chiral phosphorothioates, phosphorodithioates, phosphotriesters, aminoalkyl phosphotriesters, methyl and other alkyl phosphonates including 3′-alkylene phosphonates and chiral phosphonates, phosphinates, phosphoramidates including 3′-amino phosphoramidate and aminoalkylphosphoramidates, thionophosphoramidates, thionoalkylphosphonates, thionoalkylphosphotriesters, and boranophosphates having normal 3′-5′ linkages, 2′-5′ linked analogs of these, and those having inverted polarity wherein the adjacent pairs of nucleoside units are linked 3′-5′ to 5′-3′ or 2′-5′ to 5′-2′. Alternatively, modified polynucleotide backbones that do not include a phosphorus atom therein have backbones that are formed by short chain alkyl or cycloalkyl internucleoside linkages, mixed heteroatom and alkyl or cycloalkyl internucleoside linkages, or one or more short chain heteroatomic or heterocyclic internucleoside linkages. These include those having morpholino linkages (formed in part from the sugar portion of a nucleoside); siloxane backbones; sulfide, sulfoxide and sulfone backbones; formacetyl and thioformacetyl backbones; methylene formacetyl and thioformacetyl backbones; alkene containing backbones; sulfamate backbones; methyleneimino and methylenehydrazino backbones; sulfonate and sulfonamide backbones; amide backbones; and others having mixed N, O, S and CH2 component parts, as disclosed in U.S. Pat. Nos. 5,034,506; 5,166,315; 5,185,444; 5,214,134; 5,216,141; 5,235,033; 5,264,562; 5,264,564; 5,405,938; 5,434,257; 5,466,677; 5,470,967; 5,489,677; 5,541,307; 5,561,225; 5,596,086; 5,602,240; 5,610,289; 5,602,240; 5,608,046; 5,610,289; 5,618,704; 5,623,070; 5,663,312; 5,633,360; 5,677,437; and 5,677,439. Other polynucleotides include, but are not limited to those modified in both sugar and the internucleoside linkage, i.e., the backbone, of the nucleotide units are replaced with novel groups. The base units are maintained for complementation with the appropriate polynucleotide target. An example for such a polynucleotide mimetic, includes peptide nucleic acid (PNA). A PNA polynucleotide refers to a polynucleotide where the sugar-backbone is replaced with an amide containing backbone, in particular an aminoethylglycine backbone. The bases are retained and are bound directly or indirectly to aza nitrogen atoms of the amide portion of the backbone. United States patents that teach the preparation of PNA compounds include, but are not limited to, U.S. Pat. Nos. 5,539,082; 5,714,331; and 5,719,262, each of which is herein incorporated by reference. In various embodiments, polynucleotides can include base modifications or substitutions. As used herein, “unmodified” or “natural” bases include the purine bases adenine (A) and guanine (G), and the pyrimidine bases thymine (T), cytosine (C) and uracil (U). Modified bases include but are not limited to other synthetic and natural bases such as 5-methylcytosine (5-me-C), 5-hydroxymethyl cytosine, xanthine, hypoxanthine, 2-aminoadenine, 6-methyl and other alkyl derivatives of adenine and guanine, 2-propyl and other alkyl derivatives of adenine and guanine, 2-thiouracil, 2-thiothymine and 2-thiocytosine, 5-halouracil and cytosine, 5-propynyl uracil and cytosine, 6-azo uracil, cytosine and thymine, 5-uracil (pseudouracil), 4-thiouracil, 8-halo, 8-amino, 8-thiol, 8-thioalkyl, 8-hydroxyl and other 8-substituted adenines and guanines, 5-halo particularly 5-bromo, 5-trifluoromethyl and other 5-substituted uracils and cytosines, 7-methylguanine and 7-methyladenine, 8-azaguanine and 8-azaadenine, 7-deazaguanine and 7-deazaadenine and 3-deazaguanine and 3-deazaadenine. Further bases include those disclosed in U.S. Pat. No. 3,687,808, those disclosed in The Concise Encyclopedia Of Polymer Science And Engineering, pages 858-859, Kroschwitz, J. I., ed. John Wiley & Sons, 1990, those disclosed by Englisch et al., Angewandte Chemie, International Edition, 1991, 30, 613, and those disclosed by Sanghvi, Y. S., Chapter 15, Antisense Research and Applications, pages 289-302, Crooke, S. T. and Lebleu, B., ed., CRC Press, 1993. These include, for example, 5-substituted pyrimidines, 6-azapyrimidines and N2, N-6 and O-6 substituted purines, including 2-aminopropyladenine, 5-propynyluracil and 5-propynylcytosine. 5-methylcytosine substitutions have been shown to increase nucleic acid duplex stability by 0.6-1.2° C. and can be when combined with 2′-O-methoxyethyl sugar modifications.

[0668] By “isolated” nucleic acid molecule(s) is intended a nucleic acid molecule, DNA or RNA, that has been removed from its native environment or that has never existed in its native environment or that is a de novo novel nucleic acid molecule. For example, recombinant DNA molecules contained in a DNA construct are considered isolated. Further examples of isolated DNA molecules include recombinant DNA molecules maintained in heterologous host cells or purified (partially or substantially) DNA molecules in solution. Isolated RNA molecules can include in vitro RNA transcripts of DNA molecules. Isolated nucleic acid molecules, according to the present invention, further include such molecules produced synthetically.

[0669] A “plant”, as used herein refers to any of various photosynthetic, eukaryotic, multicellular organisms of the kingdom Plantae characteristically producing embryos, containing chloroplasts, and having cellulose cell walls. A part of a plant, i.e., a “plant tissue” may be treated according to the methods described herein to prevent phytopathogen infestation on the plant or on the part of the plant. Many suitable plant tissues can be treated according to the present invention and include, but are not limited to, somatic embryos, pollen, leaves, stems, calli, stolons, microtubers, and shoots. Thus, in various embodiments, the treatment of angiosperm and gymnosperm plants including vegetables, fruits, cereals and others such as acacia, alfalfa, apple, apricot, artichoke, ash tree, asparagus, avocado, banana, barley, beans, beet, birch, beech, blackberry, blueberry, broccoli, brussels sprouts, cabbage, cannabis, canola, cantaloupe, carrot, cassava, cauliflower, cedar, a cereal, celery, chestnut, cherry, cabbage, citrus, clementine, clover, coffee, corn, cotton, cowpea, cucumber, cucurbits, cypress, eggplant, elm, endive, eucalyptus, fennel, figs, fir, geranium, grape, grapefruit, groundnuts, ground cherry, gum hemlock, hemp, hickory, hops, jatropha, kale, kiwifruit, kohlrabi, larch, lettuce, leek, legumes, lemon, lime, locust, pine, maidenhair, maize, mango, maple, melon, millets, mushroom, mustard, nuts, oak, oats, okra, onion, orange, an ornamental plant or flower or tree, papaya, palm, parsley, parsnip, pea, peach, peanut, pear, peat, pepper, persimmon, pigeon pea, pine, pineapple, plantain, plum, pomegranate, potato, pumpkin, radicchio, radish, rapeseed, raspberry, rice, rye, sorghum, soybean, spinach, spruce, squash, strawberry, sugarbeet, sugarcane, sunflower, sweet potato, sweet corn, tangerine, tea, tobacco, tomato, trees, triticale, turf grasses, turnips, a vine, walnut, watercress, watermelon, wheat, yams, yew, and zucchini is envisioned. The term “plant” encompasses all plants and plant populations such as desirable and undesirable wild plants, cultivars, and plant varieties. Cultivars and plant varieties can be plants obtained by conventional propagation and breeding methods which can be assisted or supplemented by one or more biotechnological methods such as by use of double haploids, protoplast fusion, random or directed mutagenesis, molecular or genetic markers or by bioengineering or genetic engineering methods. The term plant also encompasses modified plants, in which the plant genome is modified by any method including (e.g., by mutation, deletion, gene editing, introduction of a transgene, hybridization, etc.).

[0670] The term “plant tissue” also encompasses plant cells. Plant cells include suspension cultures, callus, embryos, meristematic regions, callus tissue, leaves, roots, shoots, gametophytes, sporophytes, pollen, seeds and microspores. Plant tissues may be at various stages of maturity and may be grown in liquid or solid culture, or in soil or suitable media in pots, greenhouses or fields. A plant tissue also refers to any clone of such a plant, seed, progeny, propagule whether generated sexually or asexually, and descendants of any of these, such as cuttings or seed.

[0671] The term “controlling an infection of a plant by a phytopathogen” indicates a reduction in the infectivity, and/growth rate, and/or proliferation rate of the phytopathogen in the host plant. Such control can comprise cessation of infection, growth, development, reproduction and/or pathogenicity and/or eventual death of the phytoathogen.

[0672] The term “fungus” refers to any of numerous spore-producing eukaryotic organisms of the kingdom Fungi, that lack chlorophyll and vascular tissue and range in form from a single cell to a mass of branched filamentous hyphae that often produce specialized fruiting bodies. The kingdom includes the yeasts, smuts, rusts, mushrooms, and many molds, excluding the slime molds and the water molds. Also included within the term “fungus” as used herein are fungus-like eukaryotic microorganisms such as the oomycota or oomycetes which include notorious pathogens of plants, causing devastating diseases such as late blight of potato and sudden oak death. Examples of oomycetes include, but are not limited to Phytophthora infestans, Phytophthora palmivora, Phytophthora sojae, and the like. oomycetes are for the purposes of the present invention, included within the term “fungal” or “fungus”.

[0673] As used herein, the term “phytopathogenic” or “pathogenic” refers to a fungus or other pathogen that causes a disease in a plant.

[0674] As used herein, “a DNA capable of expressing a dsRNA” or a “DNA that expresses a dsRNA” or “a DNA that provides a transcriptional template for inhibitory dsRNA or antisense RNA” refers to any DNA molecule that encodes an inhibitory nucleic acid molecule (e.g., a dsRNA). Upon transcription, an inhibitory nucleic acid (e.g., an RNA molecule that can comprise dsRNA), is produced as described herein. In various embodiments the RNA molecule may be an mRNA molecule, a single-stranded antisense RNA, or a dsRNA, for example an shpRNA, siRNA, tasiRNA, miRNA or other classes of inhibitory RNAs. The DNA may comprise one or more than one antisense sequence(s). Thus, the DNA may comprise one or more than one antisense sequence(s) against the target gene(s) described herein. In certain embodiments, the DNA may comprise one or more than one sense sequence(s) which is (are) substantially complementary to the antisense sequence(s). The antisense and sense sequences may be present on the same or on different DNA strands. Upon transcription, inhibitory molecule(s) comprising the antisense and possibly sense sequences are generated.

[0675] DNA capable of expressing an inhibitory nucleic acid molecule (e.g., a dsRNA) may be present within an expression cassette.

[0676] As used herein, an “expression cassette” is a nucleic acid molecule that is composed of one or more genes or genetic sequences and the sequences controlling their expression. An expression cassette may contain a promoter regulatory sequence, also designated promoter, operably linked to an open reading frame or another genetic sequence, and typically a 3′ untranslated region that may contain a polyadenylation site. The promoter directs the machinery of the cell to make RNA and/or protein. As used herein, “operably linked” means that transcription and/or expression of the linked DNA sequences is under control of the promoter and, in various embodiments, occurs in a plant transfected with the cassette. In certain embodiments, an expression cassette may be part of a vector used for cloning and introducing the DNA into a cell.

[0677] The term “downregulate expression of a gene” refers to reduction of expression of at least 20%, or at least 30%, or at least 40%, or at least 50%, or at least 60%, or at least 70%, or at least 80%, or at least 90%, or at least 95% or of 100% for a target gene as described herein as compared to expression in a non-transgenic plant of identical phenotype, or an untreated plant of identical phenotype (e.g., in either case a plant not contacted with and not comprising a dsRNA described herein). Preferably, the damages on the plant are reduced by at least 10%, 20%, 30%, 40%, 50%, 60%, 70%, 80%, 90% or by 100% as compared to a plant not contacted with and not comprising a dsRNA described herein.

[0678] The transgenic plant is produced according to methods well known to those of skill in the art. Thus, for introducing the DNA encoding the dsRNA(s) described herein molecule into a plant or a part thereof, the DNA molecule or the expression cassette harboring the DNA may be inserted into a vector. Vectors that harbor a DNA polynucleotide for effecting inhibition of gene expression in a plant cell are known to those in the art and are also useful for the transgenic plants described herein. In addition to the DNA molecule, the vector may comprise heterologous regulatory element(s) in the 5′ and optionally in the 3′ positions that are able to function in a plant. The vector may comprise a promoter regulatory sequence that is functional in plant cells, operably linked to the DNA molecule, and optionally a terminator regulatory sequence. In certain embodiments, such a vector may be a hairpin vector or a double promoter vector, as known in the art. Using this type of vector, the inserted DNA molecule is transcribed bidirectionally. An inverted double promoter allows the expression of one DNA sequence in the 3′ direction and of a second DNA sequence in the 5′ direction, whereby the resulting RNAs are substantially complementary to each other and generate dsRNA. Alternatively, two promoters or a bidirectional promoter, e.g. the mannopine synthase promoter (Guevara-Garcia et al. (1993) Plant J. (3); 495-505), may be employed such that one promoter regulates the transcription of a DNA sequence comprising an antisense sequence and the second promoter regulates the transcription of a DNA sequence comprising an antisense sequence, which, however, is present on the DNA not in complementary location to the sense sequence. Suitable binary vectors for the transformation of plants include but are not limited to the pBINPLUS vector (van Engelen et al. (1995) Transgenic Res. 4: 288-290), the pGPTV vector (Becker et al. (1992) Plant Mol. Biol., 29: 1195-1197), the p6U and p7U vector (DNA Cloning Service e. K., Hamburg, Germany; www.dna-cloning.com; U.S. Pat. No. 7,834,243), and the like.

[0679] The term “promoter regulatory sequence” or “promoter” is intended to mean any promoter of a gene that can be expressed in a plant. Such promoter may be a promoter that is naturally present in a plant or is of fungal, bacterial or viral origin. In certain embodiments, the promoter is a tissue specific promoter and/or a pathogen inducible promoter. In certain embodiments, the promoter can be a synthetic promoter. Examples of promoters of plant origin are the histone promoter (EP 0 507 698) or the rice actin promoter (U.S. Pat. No. 5,641,876). Examples of promoters of a plant virus gene are the cauliflower mosaic virus (CaMV 19S or 35S), the cassava vein mosaic virus (CsVMV: PCT Publication No: WO97/048819) or the circovirus promoter (Australian Patent AU 689 311). Examples of tissue-specific promoters are the napin (European patent No: EP 255 378), phaseolin, glutenin, helianthinin (PCT Publication No; WO 92/017580), albumin (PCT Publication No; WO 98/045460) and oleosin (PCT Publication No; WO 98/045461) promoter. Examples of inducible promoters include, but are not limited to the promoters of phenylalanine ammonia lyase (PAL), of HMG-CoA reductase (HMG), of chitinases, of glucanases, of proteinase inhibitors (PI), of genes of the PR1 family, of nopaline synthase (nos) or of the vspB gene (U.S. Pat. No. 5,670,349), the HMG2 promoter (U.S. Pat. No. 5,670,349), the apple beta-galactosidase (ABG1) promoter or the apple amino cyclopropane carboxylate synthase (ACC synthase) promoter (PCT Publication No: WO 98/045445), or chimeric pathogen inducible promoters (PCT Publication Nos WO 2000/029592; WO 2007/147395; WO 2013/091612).

[0680] The terms “ortholog” or “orthologous” genes refer to genes that encode a polypeptide or protein in one species that is the functional counterpart of a polypeptide or protein in different species. While, formally, the term “orthologous” reflects separation via a speciation event, as used herein, orthologs need not be so limited. For example, an ortholog may also refer to genes that encode a polypeptide or protein that is the functional counterpart of a polypeptide or protein in the same species. For example, an ortholog may also refer to a gene that encodes protein that is a functionally similar counterpart to the protein encoded by the “target gene” of interest. In certain embodiments orthologs can be defined by percentage identity or by percentage similarity at the protein level or at the DNA level. Percentage identity at the protein level correlates with the proportion of identical amino-acid residues shared between two protein sequences compared in an alignment. Similarly, percentage identity at the DNA level correlates with the proportion of identical nucleic acid residues shared between two nucleic acid sequences compared in an alignment. Percentage similarity at the protein level correlates with the proportion of amino-acid residues having similar structural properties that is shared between two sequences compared in an alignment. Percentages of similarity and identity can be calculated over a portion of the primary structure and/or over the entire gene/protein sequence. For example, amino-acid residues having similar structural properties can be substituted for one another, such as the substitutions of analogous hydrophilic amino-acid residues, and the substitution of analogous hydrophobic amino-acid residues. Percentages of similarity and identity can be calculated over a portion of the primary structure and not over the entire gene/protein sequence. For the present disclosure, an ortholog or an orthologous sequence at the protein or or DNA level is a protein or DNA molecule with sequence identity of at least 35%, 40%, 45%, 50%, 55%, 60%, 65%, 70%, 75%, 80%, 85%, 90%, 95%, and/or 98%. In certain embodiments an ortholog or orthologous sequence is also defined as a homologous molecule with a protein sequence identity of 20% to 34% and/or protein sequence similarity of 30% to 39% if the E value is smaller than 1e-10.

[0681] The Expect value (E) is a parameter that describes the number of hits one can “expect” to see by chance when searching a database of a particular size. The lower the E-Value or closer it is to zero, the more “significant” the match is. The E-value takes into account both the length of the query sequence (e.g., the GolorMGH1v4 sequence) and the sequence score based on local ungapped alignments. Essentially, the E value describes the random background noise. For example, an E value of 1 assigned to a hit can be interpreted as meaning that in a database of the current size one might expect to see 1 match with a similar score simply by chance. The lower the E-value, or the closer it is to zero, the more “significant” the match is. However, virtually identical short alignments can have relatively high E values. This is because the calculation of the E value takes into account the length of the query sequence. These high E values reflects the fact that shorter sequences have a higher probability of occurring in the database purely by chance. The Expect value can also be used as a convenient way to create a significance threshold for reporting results. The Expect value threshold on most BLAST search pages can be adjusted. When the Expect value is increased from the default value of 10, a larger list with more low-scoring hits can be reported.

[0682] The term “target gene” as used herein refers to a gene that is to be inhibited and/or whose expression is to be downregulated using, e.g., an inhibitory RNA as described herein. A “target gene ortholog” or “orthologous target gene” refers to a gene orthologous to the reference target gene that is to be downregulated. In certain embodiments the downregulated target is a gene in a different strain or species than the reference gene.

[0683] As used herein, the terms “identity,” “sequence identity”, e.g., “percent identity” to an amino acid sequence or to a nucleotide sequence disclosed herein refers to a relationship between two or more amino acid sequences or between two or more nucleotide sequences. When a position in one sequence is occupied by the same nucleic acid base or amino acid in the corresponding position of the comparator sequence, the sequences are said to be “identical” at that position. The percentage of “sequence identity” is calculated by determining the number of positions at which the identical nucleic acid base or amino acid occurs in both sequences to yield the number of “identical” positions. The number of “identical” positions is then divided by the total number of positions in the comparison window and multiplied by 100 to yield the percentage of “sequence identity.” Percentage of “sequence identity” is determined by comparing two optimally aligned sequences over a comparison window. In order to optimally align sequences for comparison, the portion of a nucleotide or amino acid sequence in the comparison window can comprise additions or deletions termed gaps while the reference sequence is kept constant. An optimal alignment is that alignment which, even with gaps, produces the greatest possible number of “identical” positions between the reference and comparator sequences. Percentage “sequence identity” between two sequences can be determined using, e.g., the program “BLAST” which is available from the National Center for Biotechnology Information, and which program incorporates the programs BLASTN (for nucleotide sequence comparison) and BLASTP (for amino acid sequence comparison), which programs are based on the algorithm of Karlin and Altschul ((1993). Proc. Natl. Acad. Sci. USA. 90(12); 5873-5877).

[0684] The term “percent similarly can refer to the extent to which nucleotide or protein sequences are related. Similarity between two sequences can be expressed as percent sequence identity and/or percent positive substitutions. Percent similarly can refer to percent positives in BLAST (see, e.g., //www.ncbi.nlm.nih.gov/books/NBK62051; Fassler & Cooper (2008-) BLAST Glossary. 2011 Jul. 14. In: BLAST® Help [Internet]. Bethesda (MD); National Center for Biotechnology Information (US), available from: //www.ncbi.nlm.nih.gov/books/NBK62051).

[0685] The term “substitution” refers to the presence of a non-identical amino acid at a given position in an alignment. If the aligned residues have similar physico-chemical properties or have a positive score in the governing scoring matrix the substitution is said to be conservative.

[0686] A “conserved substitution” refers to a change at a specific position of an amino acid or DNA sequence that preserves the physico-chemical properties of the original residue or achieves a positive score in the governing scoring matrix.

[0687] As used herein, the term “complementary” refers to the ability of polynucleotides to form base pairs with one another. Base pairs are typically formed by hydrogen bonds between nucleotide units in antiparallel polynucleotide strands. Complementary polynucleotide strands can base pair in the Watson-Crick manner (e.g., A to T, A to U, C to G), or in any other manner that allows for the formation of duplexes. When using RNA as opposed to DNA, uracil (U) rather than thymine (T) is the base that is considered to be complementary to adenosine. However, when a U is denoted in the context of the present invention, the ability to substitute a T is implied, unless otherwise stated.

[0688] The term “agrochemical” as used herein means a chemical substance, whether naturally or synthetically obtained, that is applied to a plant, to a pest or to a locus thereof to result in expressing a desired biological activity.

[0689] The term “biological activity” as used herein refers to elicitation of a stimulatory, inhibitory, regulatory, therapeutic, toxic or lethal response in a plant or in a pest such as a pathogen, parasite or feeding organism present in or on a plant or the elicitation of such a response in a locus of a plant, a pest or a structure.

[0690] A “fungicide” can be a compound or agent, whether chemical or biological, that can inhibit the growth or propagation of a fungus or kill a fungus. In some examples, a fungicide may include compounds that may be fungistatic or fungicidal. In some examples, fungicide can be a protectant, or agents that are effective predominantly on the seed surface, providing protection against seed surface-borne pathogens and/or providing some level of control of soil-borne pathogens or providing some level control of leaf-borne fungal pathogen.

[0691] It will be noted that where a dsRNA is referenced by a nucleotide sequence that is a DNA (i.e., contains “U” rather than “T”), the corresponding RNA sequences are contemplated. Similarly, where a single strand is provided the double stranded nucleic acid is contemplated.

### BRIEF DESCRIPTION OF THE DRAWINGS

[0692] FIG. 1 shows that G. orontii MGH1 uptakes extracellular RNA. Germinated spores were incubated with RNA containing fluorescein conjugated UTPs or water. Before imaging RNases were added. Images taken with Zeiss Axio Imager using the 20× objective. DIC=Differential Interference Contrast. GFP=Green Fluorescent Protein Filter Set. Scale bar=50 μm.

[0693] FIG. 2 shows an overview of one embodiment of spray-induced gene silencing methodology. The flowchart outlines target gene selection, siRNA and long dsRNA design, spray-induced gene silencing protocol, and methods used to identify powdery mildew infection phenotypes. Noted methods of selecting gene targets and evaluating pathogen growth and reproduction are illustrative.

[0694] FIG. 3, panels a-e, shows that siRNA and long dsRNA targeting CYP51 reduces spore production and hyphal length. Panel a) Diagram of CYP51 and targeting RNAs. CYP51 is 1578 bp. Panel b) Average normalized spore production displayed from n≥3. Spore suspension concentrations were normalized to the input tissue weight (g) before being normalized to the control. Error bars±SEM. *p<0.05 by Student's T-Test (unpaired, 2-tailed compared to control. Panel c) Less powdery mildew coverage and density observed on CYP51 dsRNA-1 sprayed A. thaliana plants. Image taken 9 days post infection. Panel d) G. orontii MGH1 hyphal length is reduced by siRNAs targeting CYP51 on A. thaliana. Calcofluor-stained G. orontii imaged at 2 dpi with a Zeiss Axio Imager using a 10× objective and DAPI long pass filter set. Scale bar is 100 μm. Panel e) Average total hyphal length of colonies at 2 and 3 dpi from detached leaf experiments using 1% agar plates. Error bars±SEM. *p<0.05 by Student's T-Test (unpaired, 2-tailed) compared to control. Similar results observed in an independent experiment.

[0695] FIG. 4 shows that G. orontii MGH1 spore production is impacted by long dsRNA targeting metabolic, regulatory, and effector genes on A. thaliana whole plant and detached leaf assays. Average normalized spore production displayed from n≥3. Spore suspension concentrations were normalized to the input tissue weight (g) before being normalized to the control. Error bars±SEM. *p<0.05 by Student's T-Test (unpaired, 2-tailed compared to control. Note, this represents a subset of target categories and G. orontii powdery mildew targets similarly tested. See, for example, Tables 1 and 2 for additional targets.

[0696] FIG. 5 illustrates G. orontii MGH1 gene expression for the spray-induced gene silencing targets in FIG. 4 at 0, 6, 12, 24, 72, and 120 hours post infection. Mean normalized FPKM (fragments per kilobase of exon per million reads) with n=3 is displayed for each gene+/−SE. Golor4 annotated genome can be accessed through MycoCosm (Grigoriev et al., 2014). Black and gray box denote central metabolic functions (cell membrane biosynthesis, methionine salvage pathway). Genes involved in glycogen metabolism are in blue box. Light blue box encloses genes involved in storage lipid metabolism. Green box includes genes expected to be involved in fungal manipulation of plant processes or response to plant-induced stress. As in FIG. 4, this figure represents a subset of genes profiled.

[0697] FIG. 6, panels a-b, shows that G. orontii MGH1 spore production is reduced by siRNAs targeting EC2 and BCDO on A. thaliana. Panel a) Detached leaves sprayed with BCDO siRNA have reduced powdery mildew and less chlorosis than the control at 8 days post infection. Panel b) Average normalized spore production displayed from n≥3. Spore suspension concentrations were normalized to the input tissue weight (g) before being normalized to the control. Error bars±SEM. *p<0.05 by Student's T-Test (unpaired, 2-tailed) compared to control. † n=2, each experiment p<0.00005.

[0698] FIG. 7, panels a-b, shows that long dsRNA targeting genes in E. necator reduces spore production on V. vinifera. Panel a) Average normalized spore production displayed from n≥3. Spore suspension concentrations were normalized to the input tissue weight (g) before being normalized to the control. Error bars±SEM. *p<0.05 by Student's T-Test (unpaired, 2-tailed compared to control. † n=2, each experiment p<0.05. Panel b) Less powdery mildew density observed on CYP51 long dsRNA sprayed V. vinifera 9 days post infection.

[0699] FIG. 8 illustrates G. orontii developmental timeline. Modified from Both et al., 2005.

[0700] FIG. 9, panels a-b, illustrates carotenoid biosynthesis enzymes annotated in G. orontii MGH1 and A. thaliana. Panel a) Enzyme classes in red-colored boxes represent genes identified in G. orontii. Panel b) Enzyme classes in boxes highlighted green represent genes present in A. thaliana. Among abscisic acid biosynthesis genes, genes in red boxes are down-regulated (p<0.05) at the infection site during G. orontii infection at 5 dpi (Chandran et al., 2010). Down-regulated genes infected: uninfected expression ratios were: 0.2 for EC 1.23.5.1 (AT1G08550, NPQ4), 0.1 for EC 1.14.14.137 (AT3G19270, CYP707A4), and 0.3 for EC 3.2.1.175 (AT1G52400, BGLU18). Carotenoid Biosynthesis maps (00906) were accessed through KEGG.

[0701] FIG. 10, panels a-d, shows that powdery mildew infection assays identify A. thaliana TCP transcription factor and G. orontii effector (OEC) genes contributing to spore production. Panel a) TCP-OEC Protein interaction map and associated powdery mildew spore production phenotypes Interactions were identified by yeast-two hybrid using G. orontii MPIPZ effectors (WeBling et al., 2014). Effector homologs not identified in G. orontii MGH1 are omitted. The genetic contribution to spore production of all genes inside bolded shapes were measured in G. orontii MPIPZ infection of A. thaliana experiments. TCP ovals shaded if associated adult tcp mutant has enhanced powdery mildew spore production. tcp15 mutant seedlings have enhanced disease susceptibility (WeBling et al., 2014). Panel b) G. orontii MGH1 effector-TCP interactions inferred from G. ororntii MPIPZ interactions (WeBling et al., 2014) investigated in this study. The genetic contribution to spore production of all genes inside bolded shapes were measured in G. orontii MGH1 infection of A. thaliana adult plant experiments. TCP ovals shaded if associated tcp mutant has enhanced powdery mildew spore production. OEC circles are shaded to indicate less spore production when homologs of OECs were targeted using spray-induced gene silencing. Panel c) G. orontii MGH1 spore production on T-DNA insertion tcp mutants. Average normalized spore production of n≥6 displayed±SE. Panel d) Spore production of G. orontii MGH1 when targeting homologs of OECs using spray-induced gene silencing. CYP51 is included as a positive control gene required for fungal growth. Average normalized spore production of n≥3 displayed±SE. *p<0.05 by Student's T-Test (unpaired, 2-tailed)

[0702] FIG. 11 illustrates G. orontii MGH1 OEC60/OEC61 homologs have structural homology to other glycosyl hydrolase family 17 domain-containing proteins. RaptorX protein structure prediction (Wang et al., 2016) model for G. orontii MGH1 protein OEC60/OEC61 (blue) aligned with Barley endoglucanase (green, PDB ID:1ghs) and Rhizomucor miehei glycoside hydrolase family 17 beta-1,3-glucanosyltransferase which had the highest scored protein structure in the Protein Databank (Pink, PBD ID: 4wtp).

[0703] FIG. 12, shows that a long dsRNA targeting homolog of OEC60/OEOC61 in E. necator reduces spore production on V. vinifera leaf discs. Average normalized spore production displayed from n=4. Spore suspension concentrations were normalized to the input tissue weight (g) before being normalized to the control. CYP51 is included as a positive control gene required for growth. Error bars±SEM. *p<0.05 by Student's T-Test (unpaired, 2-tailed) compared to control.

[0704] FIG. 13 shows that G. orontii MGH1 homolog of OEC60/OEC61 colocalizes with TCP13 in plant nuclei. YFP-TCP13 and OEC60/OEC61-CFP were co-expressed in Nicotiana benthamiana leaf tissue using Agrobacterium-mediated transient expression. Before microscopy, DAPI was infiltrated into tissue to stain DNA and highlight the nuclei. Top panel: Individual fluorescence channels of coinfiltrated leaf tissue. Scale bar is 100 μm. Bottom panel: Red vector (30 μm) drawn through a nucleus of a merged image from top panel shows strong nuclear accumulation of fluorescence signal for DAPI, YFP, and CFP channels.

[0705] FIG. 14, shows that A. thaliana TCP13 interacts in planta with G. orontii MGH1. YFP-TCP13 and OEC60/OEC61-3×HA were co-expressed in Nicotiana benthamiana leaf tissue using Agrobacterium-mediated transient expression. Co-immunoprecipitation was performed to purify GFP-containing protein complexes. Western blot shows HA and GFP detection. Co-immunoprecipitations, and western blotting methods were performed using methods described in WeBling et al., 2014.

[0706] FIG. 15 illustrates G. orontii MGH1 effector expression during infection at 0, 6, 12, 24, 72, and 120 hours post infection. Mean normalized FPKM (fragments per kilobase of exon per million reads) with n=3 is displayed for each gene, ±SEM, for each gene indicated by protein ID for G. orontii MGH1 v4.0 annotated and accessed through MycoCosm (Grigoriev et al., 2014). Gene copies are omitted if not identified in RNA-Seq.

[0707] FIG. 16 shows two adjacent vines used as one replicate (larger box labeled “A”). The smaller box (labeled “B”) represents the canopy area sprayed for one treatment and data was collected from this region only.

[0708] FIG. 17 shows an overview of the powdery mildew treatments at the Kearney site (Kearney Agriculture Research and Extension Center, Parlier, CA).

[0709] FIG. 18, panels A-B, shows the disease incidence of grape berries at Kearney site. Panel A) dsRNA treated vines. Panel B) Gold Standard Control. Ttest p-value<0.05 (**); <0.01 (*). Data is average of 5 replicate sample units with standard deviation.

[0710] FIG. 19, panels A-B, shows disease severity for dsRNA treated-vines compared with the untreated control vines (t-test shown in panel A) and with Gold Standard treated vines (t-test shown in panel B). **=p-value<0.01. Data is an average of 5 replicate sample units, with standard deviation.

[0711] FIG. 20 shows berry chemistry per dsRNA treatment compared with untreated control. Mean of five samples per treatment with standard deviation is shown. “*”=ttest p<0.05 compared to untreated control. Brix (g sucrose/100 g clarified berry juice); pH units, TA (titratable acidity; g tartartic acid added per L of clarified berry juice).

[0712] FIG. 21 shows an overview of treatment regime at Armstrong field site. Red (*) boxes indicate chemical fungicide utilized. R—Rally; Q—Quintec; M—Mettel; P=Pristine; IS=Inspire Super; L=Luna; V=Vivando. Last dsRNA spray was Jun. 2, 2021.

[0713] FIG. 22, panels A-B, shows the disease incidence at the Armstrong site. Panel A) Data show mean and stdev for 5 replicates per treatment. ttest compared to untreated control; **=p<0.01, *=p<0.05. Panel B) Mean disease incidence per treatment over time.

[0714] FIG. 23 panel A, shows Powdery mildew disease severity at Armstrong site. Mean and standard deviation are shown, 5 replicates per treatment. ttest vs. untreated control p-value≤0.01 (**), ≤0.05 (*). FIG. 23, panel B, shows representative berry clusters from untreated (top) and dsRNA-treated (bottom) vines.

[0715] FIG. 24 shows that double stranded RNA targeting CYP51 reduces its expression.

### DETAILED DESCRIPTION

[0716] In various embodiments, methods and compositions for treating and/or protecting a plant from infection by a phytopathogenic fungus are provided. In particular, fungal gene targets are identified where inhibition of the gene target function (e.g., via inhibition of the expression of the gene targets) reduces the infectivity or severity of infection of a host plant by the phytopathogenic fungus. Additionally, fungal gene target process categories are identified that exhibit a high degree of success as targets that when inhibited result in decreased growth and reproduction of the phytopathogen. Methods are also provided for identifying target genes effective in controlling fungal and other plant infections. This includes both methods for prioritization of genes of interest for screening and screening methods.

[0717] RNAi-mediated gene-silencing offers a sustainable alternative approach to control of plant pathogens. Phytopathogens are in constant contact with their plant host(s) and it has been demonstrated that some plant pathogens are capable of taking up polynucleotides present in or on the host plant. Moreover, it was discovered that the obligate biotrophic powdery mildews can take up externally supplied polynucleotides, e.g., when applied to s surface of a plant. Accordingly, it is believed that RNAi-mediated gene silencing can provide an effective means for controlling or preventing an infection of a plant by a phytopathogen (e.g., a phytopathogenic fungus).

[0718] However, RNAi-mediated gene silencing requires identifying target genes in the pathogen inhibition of which provides effective control of the phytopathogen, while minimizing impact on the host plant. Because obligate biotrophs such as powdery mildews have proven difficult or impossible to culture, identification of important target genes has proven problematic.

[0719] Described herein is a novel screening system that exploits the G. orontii-A. thaliana pathosystem to rapidly identify target genes downregulation or inhibition of which can alter the pathogenesis of G. orontii (see, e.g., Example 1). Moreover, genes identified using this screening system are highly conserved and, accordingly, orthologous genes in other phytopathogenic species can be downregulated to similarly control or preventing an infection of other plant species.

[0720] Accordingly, in various embodiments, isolated double stranded RNAs (dsRNAs) are provided that are capable of reducing, controlling, or preventing an infection of a plant by a phytopathogenic fungus by downregulating one or more target G. orontii genes or orthologs of those genes as described herein. The dsRNAs include, but are not limited to long dsRNA, small inhibitory RNA (siRNA), small hairpin RNA (shRNA), miRNA, and the like. Also, in various embodiments, compositions for controlling or preventing an infection of a plant by a phytopathogenic are provided where the composition comprises one or more of the isolated dsRNA molecules described herein. In various embodiments, the composition is suitable for spray induced gene silencing (SIGS).

[0721] Having identified useful and effective target genes herein, in various embodiment a transgenic plant or a part thereof is provided where the transgenic plant comprises a transgene, where the transgene comprises a DNA that expresses (transcribes) dsRNA(s) that are capable of reducing, controlling, or preventing an infection of a plant by a phytopathogenic fungus by downregulating one or more target G. orontii genes or orthologs of those genes as described herein. Additionally, in various embodiments, a DNA encoding double stranded RNA (dsRNA) as described herein, an expression cassette comprising the DNA, and a vector comprising the expression cassette are provided. Also provided are methods of producing the transgenic plants described herein.

[0722] In various embodiments, method for controlling or preventing an infection of a plant by a phytopathogenic fungus, is provided. In certain embodiments, the method involves contacting the plant or part thereof (e.g., seed) and/or the pathogenic fungus with an isolated double-stranded RNA according as described herein. In certain embodiments, the method involves expressing in the plant to be protected at least one isolated double-stranded RNA as described herein.

[0723] Additionally methods are provided for identifying genes in a phytopathogen that when downregulated or inhibited in said phytopathogen inhibit infection of a host plant by the pathogen. In certain embodiments, the methods are implemented in a high throughput manner.

### Target Genes and Phytopathogens.

[0724] In various embodiments, target genes are identified that when inhibited (e.g., downregulated) in a phytopathogen inhibit infectivity, and/or growth, and/or reproduction of that phytopathogen on a host plant. More specifically it was discovered that inhibition of certain “target” genes (or their orthologs) implicated in certain metabolic processes can be exploited to effectively control or prevent an infection of a plant by a phytopathogen. In certain embodiments the target gene is selected from the process category: metabolism, regulation, manipulation of plant host, and/or essential cellular processes (see, e.g., Tables 1-3.

[0725] In certain embodiments, the target gene is selected from the process sub category: lipid metabolism/acquisition; carbohydrate metabolism; amino acid metabolism/salvage, nucleotide metabolism/salvage, and cofactor metabolism; essential fungal-specific metabolism; mitochondrial electron transport chain and ATP synthesis; transcriptional regulation; protein regulation; signaling; secreted proteins including effectors; plant hormone metabolism; cell cycle/DNA replication; vesicles/autophagy, and phagocytosis; ion/metal transport and osmotic homeostasis. In certain embodiments the target gene comprises a gene with a predicted important, but unknown function (see, e.g., Tables 1-3).

[0726] In certain embodiments target genes are identified that when successfully reduce phytopathogen infectivity, and/or growth, and/or reproduction. In certain embodiments these target genes fall into general categories including but not limited to: metabolism, regulation, manipulation of plant host, and essential cellular processes (see, e.g., Tables 1 and 3, below).

[0727] In certain embodiments target genes are identified that when successfully reduce phytopathogen infectivity, and/or growth, and/or reproduction. In certain embodiments these target genes fall into subcategories including but not limited to: Metabolism: lipid metabolism/acquisition, carbohydrate metabolism, amino acid metabolism/salvage, nucleotide metabolism/salvage, cofactor metabolism, essential fungal-specific metabolism, mitochondrial electron transport chain and ATP synthesis; Regulation: transcriptional regulation, protein regulation, signalling; Manipulation of plant host: secreted proteins including effectors, plant hormone metabolism; Essential cellular processes: cell cycle/DNA replication, vesicles/autophagy & phagocytosis, ion/metal transport and osmotic homeostasis (see, e.g., Tables 1 and 3, below).

[0728] Table 1 shows an illustrative, but non-liming list of powdery mildew SIGS gene targets detailed by process category. Without being bound to a particularly theory, it is believed that inhibition of those gene targets, or their orthologs can effectively control or prevent an infection of a plant by a phytopathogen.

TABLE 1
Shows an illustrative, but non-liming list of powdery mildew SIGS gene targets
detailed by process category. Subprocess categories are also illustrative, not limiting.
Bolded (black) genes were tested for efficacy in the A. thaliana-G. orontii
system. Bolded and underlined genes were also tested for efficacy in the
V. vinifera-E. necator system. Targets flagged with “**”
were tested in vineyard trials (see Example 4). Sequence ID numbers are shown are for
G. orontii sequences. Sequence ID numbers for orthologous genes in
E. necator are shown in Table 2. See Example 3 for additional detail
regarding single copy genes in G. orontii MGH1 following
recent whole genome duplication (WGD).

| SEQ | | | Putative | | Go DNA |
|---|---|---|---|---|---|
| ID | Process | Gene name or | Gene | EC | sequence |
| NO: | Category | PFAM domain | Symbol | number | (transcript) |
| | Process Category 1 - Metabolism | | | | |
| | 1A. Lipid metabolism/acquisition | | | | |
| 1** | TAG/glycerolipid | TAG lipase 1, | LIP1 | — | 4746636 |
| | | carboxyesterase | | | |
| | | domain | | | |
| 2 | TAG/glycerolipid | TAG lipase A, | LIPA | — | 4656038 |
| | | extracellular lipase | | | |
| 3 | TAG/glycerolipid | diglyceride | DGAT | 2.3.1.20 | 2922561 |
| | | acyltransferase | | | |
| 4 | TAG/glycerolipid | glycerol 2- | | 1.1.1.156 | 4323785 |
| | | dehydrogenase | | | |
| | | (NADP+) | | | |
| 5 | TAG/glycerolipid | aldehyde reductase | | 1.1.1.21 | 5367112 |
| 6 | TAG/glycerolipid | aldehyde | ALDH | 1.2.1.3 | 272360 |
| | | dehydrogenase | | | |
| | | (NAD+) | | | |
| 7 | TAG/glycerolipid | phospholipid:diacylglycerol | | 2.3.1.158 | 5327918 |
| | | acyltransferase | | | |
| 8 | TAG/glycerolipid | 2-acylglycerol 0- | | 2.3.1.22 | 5344905 |
| | | acyltransferase | | | |
| 9 | TAG/glycerolipid | 1-acylglycerol-3- | | 2.3.1.51 | 1474628 |
| | | phosphate 0- | | | |
| | | acyltransferase | | | |
| 10 | TAG/glycerolipid | glycerol kinase | | 2.7.1.30 | 5324432 |
| 11 | TAG/glycerolipid | acylglycerol lipase | | 3.1.1.23 | 4665153 |
| 12 | TAG/glycerolipid | triacylglycerol lipase; | | 3.1.1.3 | 4465299 |
| | | autophagy related | | | |
| | | lipase | | | |
| 13 | TAG/glycerolipid | triacylglycerol lipase; | | | 4402504 |
| | | Patatin-like | | | |
| | | phospholipase | | | |
| | | domain | | | |
| 14 | TAG/glycerolipid | phosphatidate | | 3.1.3.4 | 5370699 |
| | | phosphatase | | | |
| 15 | PPP pathway | transaldolase | TAL | 2.2.1.2 | 74388 |
| 16 | PPP pathway | glucose-6-phosphate | G6PD | 1.1.1.49 | 4149977 |
| | | dehydrogenase | | | |
| 17 | PPP pathway | 6- | PGLS | 3.1.1.31 | 1356707 |
| | | phosphogluconolactonase | | | |
| 18 | PPP pathway | transketolase | TKL | 2.2.1.1 | 778339 |
| 19 | PPP pathway | Glucose-6-P | GPI | 5.3.1.9 | 4423521 |
| | | isomerase | | | |
| 20** | TCA & | isocitrate lyase | ICL | 4.1.3.1 | 2918897 |
| | glyoxylate | | | | |
| | cycle | | | | |
| 21** | TCA & | malate synthase | MS | 2.3.3.9 | 5327664 |
| | glyoxylate | | | | |
| | cycle | | | | |
| 22 | TCA & | Citrate (Si) synthase | CS/MCS | 2.3.3.1 | 2948811 |
| | glyoxylate | | | | |
| | cycle | | | | |
| 23 | TCA & | Malate | | 1.1.1.37 | 4219560 |
| | glyoxylate | dehydrogenase | | | |
| | cycle | | | | |
| 24 | TCA & | Aryl formamidase | | 3.5.1.9 | 5390218 |
| | glyoxylate | | | | |
| | cycle | | | | |
| 25 | TCA & | Aconitase hydratase | | 4.2.1.3 | 2916095 |
| | glyoxylate | | | | |
| | cycle | | | | |
| 26 | TCA & | ATP citrate synthase | | 2.3.3.8 | 5327852 |
| | glyoxylate | (With CoA ligase | | | |
| | cycle | domain) | | | |
| 27 | TCA & | mt | SFC1 | | 5320942 |
| | glyoxylate | succinate/fumarate | | | |
| | cycle | antiporter | | | |
| 28 | TCA & | mt dicarboxylic | | | 5327871 |
| | glyoxylate | acid/Pi antiporter | | | |
| | cycle | | | | |
| 29 | TCA & | Pyruvate carboxylase | | 6.4.1.1 | 4650796 |
| | glyoxylate | | | | |
| | cycle | | | | |
| 30 | TCA & | Phosphoenol | | 4.1.1.49 | 5327097 |
| | glyoxylate | pyruvate kinase | | | |
| | cycle | | | | |
| 31 | TCA & | Glutamine | | 6.3.1.2 | 4727341 |
| | glyoxylate | synthetase/glutamate | | | |
| | cycle | ammonia ligase) | | | |
| 181 | TCA & | Alanine-glyoxylate | AGAT | 2.6.1.44 | 4149171 |
| | glyoxylate | aminotransferase | | | |
| | cycle | | | | |
| 32 | FA | trans-2-enoyl CoA | TER | 1.3.1.38 | 1760648 |
| | synthesis/ | reductase | | | |
| | transport | | | | |
| 33 | FA | ATP citrate | | 2.3.3.8 | 4237011 |
| | synthesis/ | lyase/synthase (with | | | |
| | transport | grasp domain) | | | |
| 34 | FA | acyl-coA synthetase | | 6.2.1.1 | 5321903 |
| | synthesis/ | | | | |
| | transport | | | | |
| 35 | FA | long chain fatty acyl- | | 6.2.1.3 | 231879 |
| | synthesis/ | coA | | | |
| | transport | synthetase/transporter | | | |
| 36 | FA | very long chain fatty | | 6.2.1._{—} | 5341277 |
| | synthesis/ | acyl-CoA | | | |
| | transport | synthetase/transporter | | | |
| 37 | FA | fatty acid elongase | | | 1366207 |
| | synthesis/ | | | | |
| | transport | | | | |
| 38 | FA | fatty acid desaturase | | 1.14.19.- | 1482059 |
| | synthesis/ | | | | |
| | transport | | | | |
| 39 | FA | stearoyl-CoA 9- | | 1.14.19.1 | 5368423 |
| | synthesis/ | desaturase | | | |
| | transport | | | | |
| 40 | FA | Acetyl-CoA | | | 5338404 |
| | synthesis/ | transporter | | | |
| | transport | | | | |
| 41 | FA | SUR7/PalI - | | | 4423742 |
| | synthesis/ | containing genes | | | |
| | transport | | | | |
| 42 | FA B- | carnitine acyl | CRAT | 2.3.1.7 | 4146576 |
| | oxidation | transferase I | | | |
| 43 | FA B- | enoyl-CoA hydratase | | 4.2.1.17 | 2910430 |
| | oxidation | | | | |
| 44 | FA B- | acyl-CoA | FadA, FadI | 2.3.1.16 | 581215 |
| | oxidation | acetyltransferase | | | |
| | | (thiolase) | | | |
| 45 | FA B- | acyl-CoA | | 1.3.99.12 | 4202856 |
| | oxidation | dehydrogenases, | | | |
| | | short chain | | | |
| 46 | FA B- | acyl-CoA | | 1.3.8.7 | 4,811,245 |
| | oxidation | dehyrogenase, | | | |
| | | medium chain | | | |
| 47 | FA B- | acyl-CoA | | 1.3.99.- | 5,328,179 |
| | oxidation | dehydrogenase, very | | | |
| | | long chain | | | |
| 48 | FA B- | acetyl-CoA C- | AtoB, | 2.3.1.9 | 1,827,800 |
| | oxidation | acetyltransferase | ACAT | | |
| 49 | FA B- | hydroxymethylglutaryl- | | 2.3.3.10 | 2922372 |
| | oxidation | CoA synthase | | | |
| 50 | FA B- | 3-hydroxybutyrate | BDH | 1.1.1.3 | 5210932 |
| | oxidation | dehydrogenase | | | |
| 51 | Phospholipid | pf01066~CDP- | | 2.7.8.1 | 5328371 |
| | metabolism | alcohol | | | |
| | | phosphatidyltransferase | | | |
| | 1B. Carbohydrate Metabolism | | | | |
| 52 | Glycogen | glycogen | GDB1 | | 5348921 |
| | metabolism | debranching | | | |
| | | enzyme | | | |
| 53 | Glycogen | glycogen | GPH1 | | 4899748 |
| | metabolism | phosphorylase | | | |
| 54 | Glycolysis | Fructose 1,6 | FBA | 4.1.2.13 | 5370817 |
| | | bisphosphate | | | |
| | | aldolase | | | |
| 55 | Glycolysis | Hexokinase | HK | 2.7.1.1 | 4537794 |
| 56 | Glycolysis | Phosphofructokinase-1 | PFK-1 | 2.7.1.11 | 4568150 |
| 57 | Glycolysis | Pyruvate kinase | PK | 2.7.1.40 | 353189 |
| 58 | Carbohydrate | pf13418~Galactose | | | 5295479 |
| | utlization | oxidase, central | | | |
| | | domain; pf00651~BT | | | |
| | | B/POZ | | | |
| | | domain; pf13854~Kelch | | | |
| | | motif; pf01344~Kelch | | | |
| | | motif | | | |
| 59 | Carbohydrate | pf04321~RmlD | | | 5322874 |
| | utlization | substrate binding | | | |
| | | domain | | | |
| 60 | Carbohydrate | pf01256~Carbohydrate | | | 5327463 |
| | utlization | kinase | | | |
| 61 | Carbohydrate | Myo-inositol, sugar, | | | 4724431 |
| | utlization | and other transporter | | | |
| | 1C. Amino acid & nucleotide metabolism & salvage; cofactor metabolism | | | | |
| 62 | Amino acid | 2,3-dioxomethio | UTR4/EN | 3.1.3.77 | 2949221 |
| | metabolism/ | pentane- 1- | OPH1 | | |
| | salvage | phosphate enolase/ | | | |
| | | phosphatase | | | |
| 63 | Amino acid | glutamate | GDH | 1.4.1.2 | 2919558 |
| | metabolism/ | dehydrogenase | | | |
| | salvage | | | | |
| 64 | Amino acid | threonine aldolase | THA | 4.1.2.5 | 2908555 |
| | metabolism/ | | | | |
| | salvage | | | | |
| 65 | Amino acid | serine o- | SATase | 2.3.1.30 | 5323679 |
| | metabolism/ | acetyltransferase | | | |
| | salvage | | | | |
| 66 | Amino acid | spermidine synthase | | 2.5.1.16 | 2912504 |
| | metabolism/ | | | | |
| | salvage | | | | |
| 67 | Amino acid | Putative 2- | | 2.3.3.14 | 4723293 |
| | metabolism/ | isopropylmalate | | | |
| | salvage | synthase | | | |
| 68 | Amino acid | Transmembrane AA | | | 5321389 |
| | metabolism/ | transporter | | | |
| | salvage | | | | |
| 69 | Amino acid | OPT oligopeptide | | | 5320262 |
| | metabolism/ | transporter | | | |
| | salvage | | | | |
| 70 | Cofactor | pf02548~Ketopantoate | KPHMT | 2.1.2.11 | 2925689 |
| | metabolism | hydroxymethyltransferase | | | |
| 71 | Cofactor | tetrahydrofolate | | 6.3.2.17 | 1288071 |
| | metabolism | synthase | | | |
| 72 | Cofactor | pf02558~Ketopantoate | | | 4442131 |
| | metabolism | reductase | | | |
| | | PanE/ApbA; | | | |
| | | pf08546~Ketopantoate | | | |
| | | reductase | | | |
| | | PanE/ApbA C | | | |
| | | terminal | | | |
| 73 | Cofactor | glycine | | 2.1.2.1 | 1010163 |
| | metabolism | hydroxymethyltransfe | | | |
| | | rase/serine aldolase | | | |
| 74 | Cofactor | dihydrofolate | DHFR | 1.5.1.3 | 327732 |
| | metabolism | reductase | | | |
| 75 | Cofactor | aminodeoxychorismate | ADC | 2.6.185 | 2912363 |
| | metabolism | synthase | synthase | | |
| 76 | Cofactor | thiamine | TPK1 | 2.7.6.2 | 2117296 |
| | metabolism | pyrophospokinase | | | |
| 77 | Cofactor | | PNC1 | 3.5.1.19 | 2645295 |
| | metabolism | | | | |
| 78 | Cofactor | pf02492~CobW/HypB/ | | | 2910885 |
| | metabolism | UreG, nucleotide- | | | |
| | | binding | | | |
| | | domain; pf07683~Cobalamin | | | |
| | | synthesis | | | |
| | | protein cobW C- | | | |
| | | terminal domain | | | |
| 79 | Nucleotide | thymidylate | TS | 2.1.1.45 | 2912202 |
| | metabolism/ | synthase | | | |
| | salvage | | | | |
| 80 | Nucleotide | adenine | | 2.4.2.7 | 4154475 |
| | metabolism/ | phosphoribosyltransferase | | | |
| | salvage | | | | |
| 81 | Nucleotide | uracil | | 2.4.2.9 | 1168816 |
| | metabolism/ | phosphoribosyltransferase | | | |
| | salvage | | | | |
| 82 | Nucleotide | uridine kinase | | 2.7.1.48 | 4200233 |
| | metabolism/ | | | | |
| | salvage | | | | |
| 83 | Nucleotide | pf00383~Cytidine | | | 5321215 |
| | metabolism/ | and deoxycytidylate | | | |
| | salvage | deaminase zinc- | | | |
| | | binding region | | | |
| 84 | Nucleotide | Nucleoside | | | 4703978 |
| | metabolism/ | transporter | | | |
| | salvage | | | | |
| | 1D. Essential fungal-specific processes | | | | |
| 85** | Sterol | Cytochrome P450 | CYP51 | — | 2918117 |
| | biosynthesis | monoxygenase 51 | | | |
| 86 | Fungal sexual | GPCR fungal | STE2 | | 454143 |
| | reproduction/ | pheromone mating | | | |
| | compatibility | factor, STE2 | | | |
| | 1E. Mitochondrial electron transport chain & ATP synthesis | | | | |
| 87 | mitochondrial | pf08238~Sel1 repeat | | | 5345424 |
| | electron | | | | |
| | transport | | | | |
| 88 | ATP synthesis | pf05405~Mitochondrial | | | 5327449 |
| | | ATP synthase B | | | |
| | | chain precursor | | | |
| | | (ATP-synt_B) | | | |
| 89 | ATP synthesis | Mitochondrial carrier | | | 4771748 |
| | | protein | | | |
| 90 | Alternative | alternative oxidase | AOX | 1.10.3.11 | 5108926 |
| | Respiratory | | | | |
| | Pathway | | | | |
| 91 | Alternative | NADH | NDE2 | 1.6.5.9 | 2918016 |
| | Respiratory | dehydrogenase | | | |
| | Pathway | | | | |
| | Process Category 2 - Regulation | | | | |
| | 2A. Transcriptional Regulation | | | | |
| 92 | Stress | apoptosis | AATF | — | 5415797 |
| | response | antagonizing | | | |
| | | transcription factor | | | |
| 93 | Stress | BZip, AP1-like | AP1-like | | 2926335 |
| | response | transcription factor | | | |
| 94 | Metabolic | glucose-induced | GID9 | | 5322369 |
| | regulation | degradation 9, | | | |
| | | negative regulator | | | |
| | | of gluconeogenesis | | | |
| 95 | Metabolic | Transcription factor, | Opi1 | | 5322885 |
| | regulation | negative regulator of | | | |
| | | phospholipid | | | |
| | | biosynthesis | | | |
| 96 | Metabolic | Transcription factor, | BrlA | | 2351034 |
| | regulation | Starvation stress, | | | |
| | | aspergillus | | | |
| 97 | Development | Transcription factor, | VelB | | 2923239 |
| | | Velvet factor (VelB), | | | |
| | | positive regulator | | | |
| 98 | Development | fungal specific | | | 5325399 |
| | | transcription factor | | | |
| | | domain, Zn2Cys6 | | | |
| | | binuclear cluster | | | |
| | | domain | | | |
| 99 | Development | Brucentaur or | BCNT | | 2718758 |
| | | craniofacial | | | |
| | | development protein | | | |
| 100 | Transcription | pf04818~CID domain | | | 4330818 |
| 101 | Transcription | pf02270~TFIIF, beta | | | 5191535 |
| | | subunit HTH domain | | | |
| 102 | RNA-binding | pf00076~RNA | | | 5400372 |
| | | recognition motif. | | | |
| | | (a.k.a. RRM, RBD or | | | |
| | | RNP domain) | | | |
| 103 | RNA-binding | RNA Recognition | | | 4204905 |
| | | Motif (RRM) | | | |
| | | containing protein | | | |
| | 2B. Protein regulation (synthesis/turnover/localization) | | | | |
| 104 | translation | pf10453~Nuclear | NUFP1 | | 2925357 |
| | | fragile X mental | | | |
| | | retardation- | | | |
| | | interacting protein 1 | | | |
| | | (NUFIP1) | | | |
| 105 | translation | pf01205~Uncharacterized | | | 4592123 |
| | | protein family | | | |
| | | UPF0029; pf05773~RWD | | | |
| | | domain | | | |
| 106 | translation | pf00642~Zinc finger | | | 5191542 |
| | | C-x8-C-x5-C-x3-H | | | |
| | | type (and similar) | | | |
| 107 | translation | pf10343~Potential | | | 5322984 |
| | | Queuosine, Q, | | | |
| | | salvage protein | | | |
| | | family | | | |
| 108 | translation | pf03914~CBF/Mak21 | | | 5345426 |
| | | family | | | |
| 109 | translation | pf01746~tRNA | | | 5252961 |
| | | (Guanine-1)- | | | |
| | | methyltransferase | | | |
| 110 | protein | pf13519~von | | | 5327452 |
| | turnover | Willebrand factor | | | |
| | | type A domain | | | |
| 111 | protein | pf02290~Signal | | | 4154136 |
| | localization/ | recognition particle | | | |
| | folding | 14kD protein | | | |
| 112 | protein | pf03810~Importin- | | | 5413492 |
| | localization/ | beta N-terminal | | | |
| | folding | domain | | | |
| 113 | protein | pf00639~PPIC-type | | | 4145655 |
| | localization/ | PPIASE domain; | | | |
| | folding | peptidyl prolyl | | | |
| | | isomerase | | | |
| | 2C. Signaling | | | | |
| 114 | G-protein | G-protein coupled | | | 4976661 |
| | coupled | glucose receptor | | | |
| | receptors | regulating Gpa2 | | | |
| 115 | G-protein | 7 Lung | | | 565343 |
| | coupled | transmembrane | | | |
| | receptors | receptor | | | |
| 116 | Mitogen- | Mitogen-activated | | | 5321860 |
| | activated | protein kinase | | | |
| | protein kinase | (MAPK) | | | |
| | and associated | | | | |
| 117 | Mitogen- | MAPK and MTOR | | | 1275796 |
| | activated | activator | | | |
| | protein kinase | | | | |
| | and associated | | | | |
| 118 | Ca2+/calmodulin- | Ca2+/Calmodulin - | CAMK1 | 2.7.11.17 | 630401 |
| | dependent | dependent protein | protein | | |
| | protein kinase | kinase | kinase | | |
| 119 | Ca2+/calmodulin- | Ca2+/Calmodulin - | CAMK1 | | 36740 |
| | dependent | dependent protein | protein | | |
| | protein kinase | kinase, EF hand | kinase | | |
| | | superfamily, | | | |
| | | Forkhead domain | | | |
| 120 | 14-3-3 | Multifunctional | | | 5323330 |
| | proteins | chaperone 14-3-3 | | | |
| 121 | 14-3-3 | 14-3-3 protein | | | 2905756 |
| | proteins | | | | |
| | Process Category 3 - Manipulation of Plant Host | | | | |
| | 3A. Secreted proteins | | | | |
| 122 | Associated | G. orontii effector | OEC60/ | — | 4531743 |
| | with TCP | candidate 60/61 | OEC61 | | |
| | network | | | | |
| 123 | Associated | G. orontii effector | OEC70 | — | 5103140 |
| | with TCP | candidate 70 | | | |
| | network | | | | |
| 124 | Associated | G. orontii effector | OEC14 | | 4149374 |
| | with TCP | candidate 14 | | | |
| | network | | | | |
| 125 | Associated | G. orontii effector | OEC21 | | 4150772 |
| | with TCP | candidate 21 | | | |
| | network | | | | |
| 126 | Associated | G. orontii effector | OEC27/ | | 4575775 |
| | with TCP | candidate 27/39 | OEC39 | | |
| | network | | | | |
| 127 | Associated | G. orontii effector | OEC59/ | | 4590467 |
| | with TCP | candidate 59/68 | OEC68 | | |
| | network | | | | |
| 128 | Associated | G. orontii effector | OEC119 | | 743938 |
| | with TCP | candidate 119 | | | |
| | network | | | | |
| 129 | Associated | G. orontii effector | OEC45 | | 4735914 |
| | with TCP | candidate 45 | | | |
| | network | | | | |
| 130 | Associated | G. orontii effector | OEC16a | | 4153770 |
| | with TCP | candidate 16a | | | |
| | network | | | | |
| 131 | Associated | G. orontii effector | OEC35 | | 4145494 |
| | with TCP | candidate 35 | | | |
| | network | | | | |
| 132 | Associated | G. orontii effector | OEC49 | | 1049062 |
| | with TCP | candidate 49 | | | |
| | network | | | | |
| 133 | Associated | G. orontii effector | OEC55 | | 5329416 |
| | with TCP | candidate 55 | | | |
| | network | | | | |
| 134 | Associated | G. orontii effector | OEC101 | | 2952104 |
| | with TCP | candidate 101 | | | |
| | network | | | | |
| 135 | Associated | G. orontii effector | OEC110 | | 2010020 |
| | with TCP | candidate 110 | | | |
| | network | | | | |
| 136 | Associated | G. orontii effector | OEC117 | | 5333593 |
| | with TCP | candidate 117 | | | |
| | network | | | | |
| 137 | Associated | G. orontii effector | OEC120 | | 4382934 |
| | with TCP | candidate 120 | | | |
| | network | | | | |
| 138 | Associated | G. orontii effector | OEC123 | | 4611944 |
| | with TCP | candidate 123 | | | |
| | network | | | | |
| 139 | Associated | G. orontii effector | OEC125 | | 5332254 |
| | with TCP | candidate 125 | | | |
| | network | | | | |
| 140 | Most highly | effector protein EC2 | EC2 | — | 5406840 |
| | expressed | | | | |
| 141 | Most highly | Heat shock protein | HSP70 | EC:4.2.1.24 | 1225464 |
| | expressed | 70 family | | | |
| 142 | Most highly | hypothetical protein | | | 5098516 |
| | expressed | | | | |
| 143 | Most highly | expressed protein | | | 492385 |
| | expressed | | | | |
| 144 | Most highly | expressed protein | | | 4653020 |
| | expressed | | | | |
| | 3B. Plant hormone metabolism | | | | |
| 145 | Abscisic acid | β-carotene 15,15′- | BCDO, | 1.13.11.51 | 2191786 |
| | (carotenoid) | dioxygenase | CarX, | | |
| | | | NCED | | |
| 146 | Abscisic acid | xanthoxin oxidase | XO | 1.1.1.288 | 4598152 |
| | (carotenoid) | | | | |
| 147 | Abscisic acid | HMG CoA | HMGCR | | 2911432 |
| | (carotenoid) | Reductase | | | |
| 148 | Abscisic acid | ABA G-protein | ABA | | 2905863 |
| | (carotenoid) | coupled receptor | GPCR | | |
| 149 | Jasmonate | acyl-coA oxidase | ACX | 1.3.3.6 | 4150159 |
| | (a-linolenate, | | | | |
| | oxylipin) | | | | |
| 150 | Jasmonate (a- | enol-CoA hydratase | MFP2 | 4.2.1.17; | 5328133 |
| | linolenate, | | | 1.1.1.35; | |
| | oxylipin) | | | 1.1.1.211 | |
| 151 | Jasmonate (a- | acetyl-coA | | 2.3.1.16 | 581215 |
| | linolenate, | acyltransferase | | | |
| | oxylipin) | | | | |
| 152 | Salicylic acid, | chorismate synthase | CS | 4.2.3.5 | 4329927 |
| | auxin | | | | |
| | (chorismate) | | | | |
| 153 | Salicylic acid, | chorismate mutase | CMU | 5.4.99,5 | 161315 |
| | auxin | | | | |
| | (chorismate) | | | | |
| 154 | Salicylic acid, | anthranilate synthase | AS | 4.1.3.27 | 5323922 |
| | auxin | | | | |
| | (chorismate) | | | | |
| | Process Category 4- Essential cellular processes | | | | |
| | 4A. Cell cycle and DNA replication | | | | |
| 155 | cell | pf00566~Rab- | | | 1449934 |
| | cycle/DNA | GTPase-TBC domain | | | |
| | replication | | | | |
| 156 | cell | pf10444~Nbl1/ | | | 5400393 |
| | cycle/DNA | Borealin N terminal | | | |
| | replication | | | | |
| 157 | cell | pf06632~DNA | | | 5400544 |
| | cycle/DNA | double-strand break | | | |
| | replication | repair and V(D)J | | | |
| | | recombination | | | |
| | | protein XRCC4 | | | |
| 158 | cell | pf00515~Tetratricopeptide | | | 242553 |
| | cycle/DNA | repeat; pf07719~Tetra | | | |
| | replication | tricopeptide | | | |
| | | repeat; pf12895~Anaphase- | | | |
| | | promoting | | | |
| | | complex, cyclosome, | | | |
| | | subunit | | | |
| | | 3; pf13424~Tetratrico | | | |
| | | peptide repeat | | | |
| 159 | cell | pf12720~Protein of | | | 2660435 |
| | cycle/DNA | unknown function | | | |
| | replication | (DUF3807) | | | |
| 160 | cell | pf00515~Tetratricopeptide | | | 2911524 |
| | cycle/DNA | repeat; pf13414~TPR | | | |
| | replication | repeat | | | |
| 161 | cell | pf00400~WD | | | 5320921 |
| | cycle/DNA | domain, G-beta | | | |
| | replication | repeat | | | |
| 162 | cell | pf13414~TPR repeat | | | 5401173 |
| | cycle/DNA | | | | |
| | replication | | | | |
| 163 | cell | Anaphase- | | | 5334394 |
| | cycle/DNA | promoting | | | |
| | replication | complex/20S | | | |
| | | cyclosome subunit | | | |
| 180 | cell | Cyclin-like protein | | | 5320204 |
| | cycle/DNA | | | | |
| | replication | | | | |
| | 4B. Vesicles, autophagy, and phagocytosis | | | | |
| 164** | vesicles, | pf04109~Autophagy | | — | 4442491 |
| | autophagy, | protein Apg9 | | | |
| | and | | | | |
| | phagocytosis | | | | |
| 165 | vesicles, | pf04727~ELMO/CED-12 | | | 5400432 |
| | autophagy, | family | | | |
| | and | | | | |
| | phagocytosis | | | | |
| 166 | vesicles, | pf00789~UBX | | | 2926434 |
| | autophagy, | domain; pf08059~SEP | | | |
| | and | | | | |
| | phagocytosis | domain; pf14555~UBA- | | | |
| | | like domain | | | |
| | 4C. Ion/Metal transport and osmotic homeostasis | | | | |
| 167 | Cell volume | pf03517~Regulator | | | 2926268 |
| | control | of volume decrease | | | |
| | | after cellular | | | |
| | | swelling | | | |
| 168 | Metal/ion | CorA-like Mg2+ | | | 5322738 |
| | transporter | transporter | | | |
| 169 | Metal/ion | Ctr family Cu2+ | | | 2945681 |
| | transporter | transporter | | | |
| | 4D. Predicted important - unknown function | | | | |
| 170 | Single copy | N/A | | | 2908248 |
| | gene | | | | |
| | following | | | | |
| | WGD; | | | | |
| | Unknown | | | | |
| 171 | Single copy | N/A | | | 2914047 |
| | gene | | | | |
| | following | | | | |
| | WGD; | | | | |
| | Unknown | | | | |
| 172 | Single copy | N/A | | | 2925115 |
| | gene | | | | |
| | following | | | | |
| | WGD; | | | | |
| | Unknown | | | | |
| 173 | Single copy | N/A | | | 4153429 |
| | gene | | | | |
| | following | | | | |
| | WGD; | | | | |
| | Unknown | | | | |
| 174 | Single copy | N/A | | | 4153434 |
| | gene | | | | |
| | following | | | | |
| | WGD; | | | | |
| | Unknown | | | | |
| 175 | Single copy | N/A | | | 5376484 |
| | gene | | | | |
| | following | | | | |
| | WGD; | | | | |
| | Unknown | | | | |
| 176 | Single copy | N/A | | | 5322922 |
| | gene | | | | |
| | following | | | | |
| | WGD; | | | | |
| | Unknown | | | | |
| 177 | Single copy | N/A | | | 5300814 |
| | gene | | | | |
| | following | | | | |
| | WGD; | | | | |
| | Unknown | | | | |
| 178 | Single copy | pf11937~Protein of | | | 5222583 |
| | gene | unknown function | | | |
| | following | (DUF3455) | | | |
| | WGD; | | | | |
| | Unknown | | | | |
| 179 | Single copy | N/A | | | 5386051 |
| | gene | | | | |
| | following | | | | |
| | WGD; | | | | |
| | Unknown | | | | |

[0729] Using the G. orontii-A. thaliana pathosystem described herein (see, e.g. Example 1, and FIG. 2) target genes were readily identified that when downregulated in a phytopathogen will inhibit infectivity, and/or growth, and/or reproduction of that phytopathogen on a host plant (see, e.g., Table 3).

[0730] As demonstrated herein the selection and screening system described herein readily identifies effective powdery mildew target genes and Table 2, below, provides a list of illustrative G. orontii target genes and their orthologs in E. necator.

TABLE 2
Illustrative G. orontii genes and E. necator orthologs that, when down
regulated in their respective phytopathogen, inhibit infectivity, and/or
growth, and/or reproduction of that phytopathogen on a host plant. All
31 of these gene targets when down-regulated by SIGS in the G. orontii-
Arabidopsis system resulted in significantly reduced powdery mildew
growth and reproduction. Eleven grapevine powdery mildew orthologs of
these genes were silenced (bolded and underlined) and all eleven showed
significantly reduced grapevine powdery mildew growth and reproduction.
E. necator targets tested in vineyard trials are indicated with “**”
below the Sequence ID Number. All effectively reduced powdery mildew
proliferation (see, e.g., Examples 4 and 5). Nineteen of these individual
gene targets show reproducible mean >50% reduction in powdery mildew
growth and reproduction. Note that two E. necator orthologs of ICL were
tested and found to be effective targets. High confidence E. necator
orthologs of G. orontii effector candidate 14 (SEQ 124), single copy gene
unknown function (SEQ 179) and Alanine-glyoxylate aminotransferase
(SEQ 181) were not identified. The sequence IDs for the specific dsRNA
tested against a target are also provided.

| | | |
|---|---|---|
| | | dsRNA |
| | | SEQ |
| SEQ ID NO | Gene Name or PFAM Domain | ID NO |

G. orontii

| | | |
|---|---|---|
| 85 | Cytochrome P450 monoxygenase (CYP51) | 212 |
| 1 | TAG lipase 1, caroboxyesterase domain | 213 |
| 2 | TAG lipase A, extracellular lipase | 214 |
| 15 | Transaldolase | 215 |
| 20 | Isocitrate lyase (ICL) | 216 |
| 21 | Malate synthase (MS) | 217 |
| 22 | Citrate (Si) synthase | 218 |
| 32 | Trans-2-enoyl CoA reductase | 219 |
| 63 | Glutamate dehydrogenase | 220 |
| 64 | Threonine aldolase | 221 |
| 70 | Pf02548-Ketopantoate | 222 |
| | hydroxymethyltransferase | |
| 71 | Tetrahydrofolate synthase | 223 |
| 79 | Thymidine synthase | 224 |
| 87 | Pf8238-Sel1 repeat | 225 |
| 92 | Apoptosis antagonizing transcription factor | 226 |
| | (AATE) | |
| 104 | Pf10453- Nuclear fragile X mental retardation- | 227 |
| | interacting protein 1 (NUFIP1) | |
| 122 | G. orontii effector candidate 60/61 | 228 |
| 123 | G. orontii effector candidate 70 | 229 |
| 124 | G. orontii effector candidate 14 | 230 |
| 140 | Effector protein EC2 | 231 |
| 141 | Heat shock protein 70 family (HSP70) | 232 |
| 145 | β-carotene 15,15′-dioxygenase (BCDO) | 233 |
| 146 | xanthoxin oxidase | 234 |
| 148 | ABA G-protein coupled receptor | 235 |
| 149 | Acyl-CoA oxidase (ACX) | 236 |
| 163 | Anaphase promoting complex/20S cyclosome | 237 |
| | subunit | |
| 164 | Pf04109 - Autophagy protein Apg9 | 238 |
| 167 | Pf03517, Regulator of cell volume after swelling | 239 |
| 169 | Ctr family Cu2+ transporter | 240 |
| 179 | Single copy gene, unknown function | 241 |
| 180 | Cyclin-like protein | 242 |
| 181 | Alanine-glyoxylate aminotransferase | 243 |

E. necator orthologs

| | | |
|---|---|---|
| 182 | En Cytochrome P450 monoxygenase (CYP51) | 244 |
| ** | | |
| 183 | En TAG lipase 1, caroboxyesterase domain | 245 |
| ** | | |
| 184 | En TAG lipase A, extracellular lipase | 246 |
| 185 | Transaldolase | |
| 186, 187 | Isocitrate lyase (ICL) | 247, 248 |
| ** | | |
| 188 | Malate synthase (MS) | 249 |
| ** | | |
| 189 | Citrate (Si) synthase | |
| 190 | Trans-2-enoyl CoA reductase | |
| 191 | Glutamate dehydrogenase | |
| 192 | Threonine aldolase | |
| 193 | Pf02548- Ketopantoate hydroxymethyltransferase | |
| 194 | Tetrahydrofolate synthase | |
| 195 | Thymidine synthase | |
| 196 | Pf8238-Sell repeat | |
| 197 | Apoptosis antagonizing transcription factor | 250 |
| | (AATF) | |
| 198 | Pf10453- Nuclear fragile X mental retardation- | |
| | interacting protein 1 (NUFIP1) | |
| 199 | G. orontii effector candidate 60/61 ortholog | 251 |
| 200 | G. orontii effector candidate 70 ortholog | 252 |
| 201 | Effector protein EC2 | 253 |
| 202 | Heat shock protein 70 family (HSP70) | |
| 203 | β-carotene 15,15′-dioxygenase (BCDO) | 254 |
| 204 | xanthoxin oxidase | |
| 205 | ABA G-protein coupled receptor | |
| 206 | Acyl-CoA oxidase (ACX) | |
| 207 | Anaphase promoting complex/20S cyclosome | |
| | subunit | |
| 208 | Pf04109 - Autophagy protein Apg9 | 255 |
| ** | | |
| 209 | Pf03517, Regulator of cell volume after swelling | |
| 210 | Ctr family Cu2+ transporter | |
| 211 | Cyclin-like protein | |

[0731] All of the gene targets shown in Table 2, when down-regulated by SIGS in the G. orontii-Arabidopsis system resulted in significantly reduced powdery mildew growth and reproduction. Nineteen of these individual gene targets show reproducible mean>=50% reduction in powdery mildew growth and reproduction (e.g., see Example 5, Table 11).

[0732] Eleven of the E. necator grapevine powdery mildew orthologs of these genes were silenced (Table 2, bolded) and all eleven showed significantly reduced grapevine powdery mildew growth and reproduction. Eight of the eleven E. necator gene targets tested showed reproducible mean≥50% reduction in powdery mildew growth and reproduction (e.g. see Example 5, Table 11). Note that two orthologs of the JCL gene were tested; each gave significantly reduced powdery mildew growth and reproduction.

TABLE 3
Provides a summary of powdery mildew SIGS targets tested by process category. Sequence IDs are given
for G. orontii. See Table 2 for Sequence ID numbers for tested E. necator orthologs.

| | G. orontii | | | E. nectar | |
|---|---|---|---|---|---|
| | | | # Tested with | | # Tested with |
| | SEQ ID | # | reduced pathogen | # | reduced pathogen |
| Process Category | NOs | Tested | growth/reproduction | Tested | growth/reproduction |

Process Category 1 - Metabolism

| 1A. Lipid metabolism/acquisition | | 8 | 7 | 4 | 4 |
|---|---|---|---|---|---|
| TAG/glycerolipid | 1-14 | 3 | 2 | 2 | 2 |
| PPP pathway | 15-19 | 1 | 1 | | |
| TCA and glyoxylate | 20-31, 181 | 4 | 4 | 2 | 2 |
| cycle | | | | | |
| FA synthesis/transport | 32-41 | 1 | 1 | | |
| FA B-oxidation | 42-50 | 0 | 0 | | |
| Phospholipid | 51 | 0 | 0 | | |
| metabolism | | | | | |
| 1B. Carbohydrate metabolism | | 3 | 0 | | |
| glycogen metabolism | 52-53 | 2 | 0 | | |
| glycolysis | 54-57 | 1 | 0 | | |
| Carbohydrate utlization | 58-61 | 0 | 0 | | |
| 1C. Amino acid & nucleotide | | 6 | 5 | | |
| metabolism & salvage; cofactor | | | | | |
| metabolism | | | | | |
| amino acid | 62-69 | 3 | 2 | | |
| metabolism/salvage | | | | | |
| cofactor metabolism | 70-78 | 2 | 2 | | |
| nucleotide | 79-84 | 1 | 1 | | |
| metabolism/salvage | | | | | |
| 1D. Essential fungal-specific | | 1 | 1 | 1 | 1 |
| processes | | | | | |
| sterol biosynthesis | 85 | 1 | 1 | 1 | 1 |
| fungal sexual | 86 | 0 | 0 | | |
| reproduction/compatibility | | | | | |
| 1E. Mitochondrial electron | | 1 | 1 | | |
| transport chain & ATP synthesis | | | | | |
| mitochondrial electron | 87 | 1 | 1 | | |
| transport chain | | | | | |
| ATP synthesis | 88-89 | 0 | 0 | | |
| Alternative Respiratory | 90-91 | 0 | 0 | | |
| Pathway | | | | | |

Process Category 2 - Regulation

| 2A. Transcriptional Regulation | | 2 | 1 | 1 | 1 |
|---|---|---|---|---|---|
| stress response | 92-93 | 1 | 1 | 1 | 1 |
| metabolic regulation | 94-96 | 1 | 0 | | |
| development | 97-99 | 0 | 0 | | |
| transcription | 100-101 | 0 | 0 | | |
| RNA-binding | 102-103 | 0 | 0 | | |
| 2B. Protein regulation | | 1 | 1 | | |
| (synthesis/turnover/localization) | | | | | |
| translation | 104-109 | 1 | 1 | | |
| protein turnover | 110 | 0 | 0 | | |
| protein | 111-113 | 0 | 0 | | |
| localization/folding | | | | | |
| 2C. Signaling | | 0 | 0 | | |
| G-protein coupled | 114-115 | 0 | 0 | | |
| receptors | | | | | |
| Mitogen-activated | 116-117 | 0 | 0 | | |
| protein kinase and | | | | | |
| associated | | | | | |
| Ca2+/Calmodulin- | 118-119 | 0 | 0 | | |
| dependent protein | | | | | |
| kinases | | | | | |
| 14-3-3 proteins | 120-121 | 0 | 0 | | |

Process Category 3 - Manipulation of plant host

| 3A. Secreted proteins | | 9 | 5 | 3 | 3 |
|---|---|---|---|---|---|
| Associated with TCP | 122-139 | 7 | 3 | 2 | 2 |
| network | | | | | |
| Most highly expressed | 140-144 | 2 | 2 | 1 | 1 |
| 3B. Plant hormone metabolism | | 6 | 4 | 1 | 1 |
| abscisic acid | 145-148 | 4 | 3 | 1 | 1 |
| (carotenoid) | | | | | |
| jasmonate (a- | 149-151 | 1 | 1 | | |
| linolenate) | | | | | |
| salicylic acid, auxin | 152-154 | 1 | 0 | | |
| (chorismate) | | | | | |

Process Category 4 - Essential cellular processes

| 4A. Cell cycle and DNA | | 1 | 1 | | |
|---|---|---|---|---|---|
| replication | | | | | |
| cell cycle/DNA | 155-163, 180 | 1 | 1 | | |
| replication | | | | | |
| 4B. Vesicles, autophagy, and | | 1 | 1 | 1 | 1 |
| phagocytosis | | | | | |
| vesicles, autophagy, | 164-166 | 1 | 1 | 1 | 1 |
| and phagocytosis | | | | | |
| 4C. Ion/Metal transport and | | 2 | 2 | | |
| osmotic homeostasis | | | | | |
| Cell volume control | 167 | 1 | 1 | | |
| Metal/ion transporter | 168-169 | 1 | 1 | | |
| 4D. Predicted important - | | 1 | 1 | | |
| unknown function | | | | | |
| Single copy gene | 170-179 | 1 | 1 | | |
| following WGD; | | | | | |
| Unknown | | | | | |
| Total targets tested | | 42 | 31 | 11 | 11 |

[0733] Novel fungal targets identified in the powdery mildew-host plant (G. orontii-A. thaliana pathosystem) system described herein can be validated for similar roles in development and/or virulence in other fungi or other phytopathogens. Moreover, it is noted that the genomes of obligate biotrophs of plants have few genes compared to other similar fungi, but the genes and pathways that are retained are similar as are the genes and pathways that are lost (e.g., Spanu (2012) Ann. Rev. Phytopath. 50: 91-109).

[0734] It has previously proven difficult to assess the function and importance of genes of obligate biotrophs as most are not culturable or genetically tractable. However, in view of the genes and pathways retained by obligate biotrophs of plants, important targets identified using SIGS against powdery mildew genes identified using the G. orontii-A. thaliana pathosystem described herein are believed to also be important for the growth and interactions of other obligate biotrophs with their host.

[0735] Accordingly, translation of identified target genes from the powdery mildew system is not limited to obligate biotrophs but may also pertain to diverse pathogens including non-obligate biotrophs, hemibiotrophs, necrotrophs and saprotroph plant pathogens. Accordingly, in various embodiments, target genes as described herein also include orthologs of the G. orontii genes identified herein (see, e.g., Table 4).

TABLE 4
Illustrative, but non-limiting examples of G. orontii genes and orthologs that,
when down regulated in their respective phytopathogen, inhibit infectivity, and/or
growth, and/or reproduction of that phytopathogen on a host plant. See Definition of
orthologs. Orthologs sharing <35% protein identify to G. orontii sequence and an
E-value of ≤E−10 are flagged with the label “**”. Note that topical dsRNA
against E. necator orthologs of ten G. orontii targets (bolded) included below
were tested and shown to effectively reduce powdery mildew of grapevine.

| Golovinomyces orontii MGH1 | | Powdery mildew: Erysiphe necator | | |
|---|---|---|---|---|
| | SEQ | | Protein | |
| Gene | ID NO | E Value | Identity | Accession |
| CYP51 | 85 | 0.00E+00 | 74.43% | AAD55135.1 |
| MS | 21 | 0.00E+00 | 76.01% | KHJ34436.1 |
| ICL | 20 | 0.00E+00 | 78.47% | KHJ31678.1 |
| LIP1 | 1 | 0.00E+00 | 76.42% | KHJ32463.1 |
| LIPA | 2 | 3.00E−146 | 51.53% | KHJ34018.1 |
| BCDO | 145 | 0.00E+00 | 67.53% | KHJ33569.1 |
| ACX | 149 | 0.00E+00 | 80.40% | KHJ31624.1 |
| AATF | 92 | 4.00E−167 | 52.66% | KHJ33437.1 |
| EC2 | 140 | 3.00E−46 | 73.91% | KHJ33901.1 |
| OEC60/OEC61 | 122 | 0.00E+00 | 60.09% | KHJ32462.1 |
| OEC70 | 123 | 1.00E−21 | 53.40% | KHJ35927.1 |
| OEC14 | 124 | — | — | no hit |
| HSP70 | 141 | 0.00E+00 | 89.58% | KHJ35398.1 |
| XO | 146 | 0.00E+00 | 79.55% | KHJ32774.1 |
| APG9 | 164 | 0.00E+00 | 62.36% | KHJ32900.1 |

| | | Powdery mildew: | | |
|---|---|---|---|---|
| Golovinomyces orontii MGH1 | | Golovinomyces chicoracearum | | |
| | SEQ | | Protein | |
| Gene | ID NO | E Value | Identity | Accession |
| CYP51 | 85 | 0E+00 | 88.95% | RKF57889.1 |
| MS | 21 | 0E+00 | 89.85% | RKF62510.1 |
| ICL | 20 | 0E+00 | 92.65% | RKF59197.1 |
| LIP1 | 1 | 0E+00 | 96.58% | RKF56564.1 |
| LIPA | 2 | 0E+00 | 89.93% | RKF53624.1 |
| BCDO | 145 | 0E+00 | 88.23% | RKF53159.1 |
| AATF | 92 | 0E+00 | 86.27% | RKF77188.1 |
| EC2 | 140 | 8E−79 | 89.05% | RKF60824.1 |
| OEC60/OEC61 | 122 | 0E+00 | 87.75% | RKF80766.1 |
| OEC70 | 123 | 2E−46 | 85.29% | RKF78082.1 |
| HSP70 | 141 | 0E+00 | 96.75% | RKF75625.1 |
| XO | 146 | 0E+00 | 93.11% | RKF78744.1 |
| APG9 | 164 | 0E+00 | 77.32% | RKF78781.1 |

| | | Powdery Mildew: | | |
|---|---|---|---|---|
| Golovinomyces orontii MGH1 | | Erysiphe pisi Palampur-1 | | |
| | SEQ | | Protein | |
| Gene | ID NO | E Value | Identity | Accession |
| CYP51 | 85 | 0E+00 | 77.1% | 2309251 |
| MS | 21 | 0E+00 | 79.3% | 1335422 |
| ICL | 20 | 0E+00 | 79.0% | 2512998 |
| LIP1 | 1 | 0E+00 | 78.1% | 2804836 |
| LIPA | 2 | 0E+00 | 78.3% | 2804836 |
| BCDO | 145 | 0E+00 | 69.5% | 2319553 |
| AATF | 92 | 7E−144 | 62.8% | 2599204 |
| EC2 | 140 | 7E−53 | 76.3% | 2549560 |
| OEC60/OEC61 | 122 | 1E−152 | 65.2% | 2315721 |
| OEC70 | 123 | 2E−13 | 67.5% | 2526873 |
| HSP70 | 141 | 0E+00 | 91.4% | 2643551 |
| XO | 146 | 2E−155 | 81.8% | 2321156 |
| APG9 | 164 | 0E+00 | 59.5% | 2690623 |

| | | Powdery Mildew: Blumeria graminis | | |
|---|---|---|---|---|
| Golovinomyces orontii MGH1 | | f. sp. hordei DH14 | | |
| | SEQ | | Protein | |
| Gene | ID NO | E Value | Identity | Accession |
| CYP51 | 85 | 0E+00 | 77.89% | CCU76296.1 |
| MS | 21 | 0E+00 | 71.56% | CCU83094.1 |
| ICL | 20 | 0E+00 | 74.54% | CCU76011.1 |
| LIP1 | 1 | 0E+00 | 70.19% | CCU76452.1 |
| LIPA | 2 | 9E−118 | 42.53% | CCU76779.1 |
| BCDO | 145 | | | no hit |
| AATF | 92 | 5E−128 | 53.42% | CCU74232.1 |
| EC2 | 140 | 2E−34 | 60.67% | CCU81481.1 |
| OEC60/OEC61 | 122 | 5E−127 | 49.49% | CCU76102.1 |
| OEC70 | 123 | 1E−05 | 42.11% | CCU76753.1 |
| HSP70 | 141 | 0E+00 | 88.26% | CCU75862.1 |
| XO | 146 | 3E−171 | 78.47% | CCU82271.1 |
| APG9 | 164 | 0E+00 | 54.73% | CCU75759.1 |

| Golovinomyces orontii MGH1 | | Grey Mold: Botrytis cinerea | | |
|---|---|---|---|---|
| | SEQ | | Protein | |
| Gene | ID NO | E Value | Identity | Accession |
| CYP51 | 85 | 0.00E+00 | 72.14% | XP_001549961.1 |
| MS | 21 | 0.00E+00 | 76.01% | XP_001551737.1 |
| ICL | 20 | 0.00E+00 | 75.57% | EMR88386.1 |
| LIP1 | 1 | 0.00E+00 | 48.60% | XP_001553224.2 |
| LIPA | 2 | 6.00E−102 | 44.69% | XP_001561332.1 |
| BCDO | 145 | 0.00E+00 | 63.38% | EMR86130.1 |
| ACX | 149 | 0.00E+00 | 74.82% | XP_001553115.1 |
| AATF | 92 | 7.00E−22 | 55.21% | XP_001546894.1 |
| EC2 | 140 | — | — | Below cutoff |
| OEC60/OEC61 | 122 | 1.00E−104 | 59.38% | EMR90602.1 |
| OEC70 | 123 | — | — | no hit |
| OEC14 | 124 | — | — | no hit |
| HSP70 | 141 | 0.00E+00 | 88.13% | XP_001557140.1 |
| XO | 146 | 1.00E−176 | 79.00% | XP_024550660.1 |
| APG9 | 164 | 0.00E+00 | 49.26% | XP_024553178.1 |
| Golovinomyces orontii MGH1 | | Rust: Fusarium graminearum | | |
| | SEQ | | Protein | |
| Gene | ID NO | E Value | Identity | Accession |
| CYP51 | 85 | 0.00E+00 | 63.89% | XP_011316750.1 |
| MS | 21 | 0.00E+00 | 73.06% | XP_011320034.1 |
| ICL | 20 | 0.00E+00 | 72.07% | XP_011315789.1 |
| LIP1 | 1 | 1.00E−177 | 48.42% | XP_011317424.1 |
| LIPA | 2 | 2.00E−96 | 41.90% | XP_011317015.1 |
| BCDO | 145 | 0.00E+00 | 53.87% | SCB65744.1 |
| ACX | 149 | 0.00E+00 | 66.13% | EYB30953.1 |
| AATF | 92 | 1.00E−67 | 41.90% | XP_011320396.1 |
| EC2 | 140 | — | — | no hit |
| OEC60/OEC61 | 122 | 5.00E−81 | 36.54% | EYB23888.1 |
| OEC70 | 123 | — | — | no hit |
| OEC14 | 124 | — | — | no hit |
| HSP70 | 141 | 0.00E+00 | 82.53% | XP_011328252.1 |
| XO | 146 | 2.00E−145 | 71.79% | XP_011315790.1 |
| APG9 | 164 | 0.00E+00 | 43.45% | PCD18080.1 |

| Golovinomyces orontii MGH1 | | Smut Fungi: Ustilago maydis | | |
|---|---|---|---|---|
| | SEQ | | Protein | |
| Gene | ID NO | E Value | Identity | Accession |
| CYP51 | 85 | 1.00E−165 | 50.81% | XP_011390148.1 |
| MS | 21 | 0.00E+00 | 55.06% | XP_011389866.1 |
| ICL | 20 | 0.00E+00 | 55.84% | XP_011387825.1 |
| LIP1 | 1 | 2.00E−76 ** | 33.68% ** | XP_011386124.1 ** |
| LIPA | 2 | — | — | no hit |
| BCDO | 145 | — | — | no hit |
| ACX | 149 | 0.00E+00 | 46.61% | XP_011388551.1 |
| AATF | 92 | 3.00E−15 ** | 25.34% ** | XP_011390839.1 ** |
| EC2 | 140 | — | — | no hit |
| OEC60/OEC61 | 122 | — | — | no hit |
| OEC70 | 123 | — | — | no hit |
| OEC14 | 124 | — | — | no hit |
| HSP70 | 141 | 0.00E+00 | 64.84% | XP_011387505.1 |
| XO | 146 | 4.00E−94 | 53.21% | XP_011392305.1 |
| APG9 | 164 | 4.00E−142 | 43.40% | XP_011391082.1 |
| Golovinomyces orontii MGH1 | | Oomycete: Phytophthora infestans | | |
| | SEQ | | Protein | |
| Gene | ID NO | E Value | Identity | Accession |
| CYP51 | 85 | 1.00E−10 | 25.37% | KAF4039312.1 |
| MS | 21 | 0.00E+00 | 54.39% | XP_002906508.1 |
| ICL2 | 20 | 7.00E−150 | 42.83% | XP_002904993.1 |
| LIP1 | 1 | 5.00E−55 ** | 30.87% ** | KAF4042355.1 ** |
| LIPA | 2 | 4.00E−17 | 35.88% | XP_002902375.1 |
| BCDO | 145 | — | — | no hit |
| ACX | 149 | 4.00E−125 | 35.37% | KAF4034308.1 |
| AATF | 92 | 9.00E−14 ** | 25.49% ** | XP_002905548.1 ** |
| EC2 | 140 | — | — | no hit |
| OEC60/OEC61 | 122 | 2.00E−13 ** | 30.85% ** | KAF4038576.1 ** |
| OEC70 | 123 | — | — | no hit |
| OEC14 | 124 | — | — | no hit |
| HSP70 | 141 | 0.00E+00 | 65.47% | XP_002909118.1 |
| XO | 146 | 2.00E−82 | 48.76% | XP_002906531.1 |
| APG9 | 164 | 5.00E−46 | 27.84% | XP_002906147.1 |

[0736] Thus, in certain embodiments the target gene(s) include the target genes shown in Tables 1 and 2, as well as the orthologs shown in Table 4, as well as other orthologs.

[0737] In certain embodiments, the target gene is selected from the group consisting of G. orontii lipase A, G. orontii lipase 1, G. orontii 03-carotene 15,15′-dioxygenase, G. orontii apoptosis-antagonizing transcription factor (AATF), effector candidate 2, OEC14, OEC60/OEC61, and OEC70. In certain embodiments, the target gene is a homolog/ortholog of a gene selected from the group consisting of G. orontii lipase a, G. orontii lipase 1, G. orontii 03-carotene 15,15′-dioxygenase, G. orontii apoptosis-antagonizing transcription factor (AATF), effector candidate 2, OEC14, OEC60/OEC61, and OEC70.

[0738] In certain embodiments, the target gene is selected from genes identified as single copy following recent whole genome duplication in G. orontii MGH1 (see, e.g., Table 1 and Example 3) as well as orthologs thereof.

[0739] In certain embodiments, the target gene is selected from genes that encode identified as potentially secreted by the powdery mildew, including effectors (see, e.g., Table 1) and Examples 1 and 2).

[0740] In certain embodiments, the target gene is selected genes encoding proteins identified as interacting with plant TCP transcription factors or their interactors (see, e.g., Table 1, and Example 2).

[0741] In certain embodiments, the target gene is a gene identified using comparative genomics, transcriptomics, evolutionary analyses, and integrated metabolic pathway analysis where the gene is:
[0742] 1. Predicted to function in primary metabolism including energy generation (see, e.g., Tables 1 and 3, Category 1; and Example 1);
[0743] 2. Predicted to function in fungal-specific metabolism (see, e.g., Tables 1 and 3; Category 1D, and Example 1);
[0744] 3. Predicted to function in acquiring or modifying an essential nutrient not made de novo in the powdery mildew based on incomplete or missing metabolic pathways (see, e.g., Tables 1 and 3, Category 1C, Amino acid & nucleotide metabolism & salvage; cofactor metabolism, and Example 1);
[0745] 4. Predicted to function in acquiring or modifying an energy-rich or costly-to-make precursor or compound from the plant and utilize it (see, e.g., Table 1, Category 1A. Lipid metabolism/acquisition, and Example 1);
[0746] 5. Predicted to function in manipulating a plant hormone or other plant metabolite (see, e.g., Tables 1 and 3, Category 3B, Plant hormone metabolism, and Example 1);
[0747] 6. Predicted to function in the regulation of phytopathogen growth, development, homeostasis, and response to the environment (see, eg., Tables 1 and 3, Category 2);
[0748] 7. Predicted to function in other essential cellular processes (see eg., Tables 1 and 3, Category 4); and/or
[0749] 8. Predicted to function in other processes of added import to an obligate biotroph (see e.g., Table 1, Category 4B vesicles, autophagy and phagocytosis and 4C ion/metal transport and osmotic homeostasis).

[0750] In certain embodiments, the ortholog is an ortholog found in an obligate biotroph. In certain embodiments, the ortholog is an ortholog found in a powdery mildew. In certain embodiments, the ortholog is an ortholog found in a powdery mildew selected from the group consisting of Erysiphe necator (or Uncinula necator) (powdery mildew of grapes), Blumeria graminis (or Erysiphe graminis) f. sp. tritici (causes powdery mildew of wheat), f. sp. hordei (powdery mildew of barley), f. sp. avenae (powdery mildew of oats), f. sp. secalis (powdery mildew of rye), Microsphaera diffusa (powdery mildew of legumes, e.g. soybean), Erysiphe pisi (powdery mildew of pea and other legumes) Leveillula taurica (also known as Oidiopsis taurica) (powdery mildew of onion, tomato or artichoke), Psuedoidium neolycopersici (or Oidium neolycopersici) (powdery mildew of tomato), Oidium sp. (powdery mildew of citrus), Podosphaera leucotricha (powdery mildew of apples and pears), Golovinomyces sp. Including G. cichoracearum, G. orontii, G. ambrosiae, G. spadiceus (powdery mildew of cucurbits, cannabis, hemp and sunflower) and Podosphaera sp. including P. macularis, P. xanthii, P. fusca, and P. aphanis, (powdery mildew of hops, cannabis, hemp, sunflower, cucurbits, melons and gourds), Sphaerotheca humuli (ornamentals), Sphaerotheca aphanis (ornamentals), Sphaerotheca mors-uvae (Black currant), Sphaerotheca pannosa (rose), Erysiphe polygoni (Cowpeas), Oidium begonia (Begonia), Podosphaera leucotricha (Fruit trees) and Podosphaera xanthii (or Sphaerotheca fuligenea, Sphaerotheca cucurbiteae) (powdery mildew of cucurbits: cucumbers, squashes (including pumpkins), luffas, melons, and watermelons). In certain embodiments, the ortholog is an ortholog found in Erysiphe necator (or Uncinula necator). In certain embodiments the ortholog comprises Arthraocladiella on goji berries, Brasiliomyces malachrae on cotton, Cystotheca wrightii on oaks, Erysiphe alphitoides on Oaks, Neoerysiphe galeopsidis on herbs, Oidium heveae on rubber plant, Parauncinula polyspora on oaks, Phyllactinia guttata on Hazel and others, Pleochaeta shiraiana on berries and trees, Sawadaea tulasnei on maple, and the like.

[0751] In certain embodiments, the target gene ortholog is an ortholog found in an ascomycete (e.g., Fusarium spp. (Fusarium wilt, stem rot and root rot disease), Thielaviopsis spp. (canker rot, black root rot, Thielaviopsis root rot), Verticillium spp., Magnaporthe grisea (rice blast), Botrytis spp. (Botrytis rots, grey mold) and Sclerotinia spp. (stem rot or white mold)). In certain embodiments, target gene ortholog an ortholog found in a Basidiomycete (e.g., Smut of cereals Ustilago spp., Sphacelotheca spp., Urocystis spp., Tilletia spp., etc.), Rhizoctonia spp., and Armillaria spp. (honey fungus species, virulent pathogens of trees), and plant rusts).

[0752] In certain embodiments, the target gene ortholog is an ortholog found in a plant rust. In certain embodiments, the ortholog is an ortholog found in a plant rust selected from the group consisting of Cronartium ribicola (White pine blister rust), Gymnosporangium juniperi-virginianae (Cedar-apple rust), Hemileia vastatrix (Coffee rust), Phakopsora meibomiae and P. pachyrhizi (Soybean rust), Puccinia spp. on many plants e.g. Puccinia coronata (Crown Rust of Oats and Ryegrass), Puccinia graminis (Stem rust of wheat and Kentucky bluegrass, or black rust of cereals), Puccinia hemerocallidis (Daylily rust), Puccinia triticina (Brown Wheat Rust), Puccinia sorghi (Common Rust of Corn), Puccinia striiformis (Yellow Rust) of cereals, Uromyces appendiculatus (Bean Rust), Puccinia melanocephala (Brown Rust of Sugarcane), and Puccinia kuehnii (Orange rust of Sugar cane), and the like).

[0753] In certain embodiments, the target gene ortholog is an ortholog found in an oomycete. E.g. Phytophthora spp. including but not limited to Phytophthora infestans (Late blight), Phytophthora ramorum (Sudden oak death and Ramorum disease), Phytophthora sojae (Stem and root rot) Phytophthora capsici (Blight; stem and fruit rot; various others), Phytophthora cinnamomi (Root rot and dieback), Phytophthora parasitica (Root and stem rot and various others), Phytophthora palmivora, Phytophthora alni, Phytophthora brassicae, Phytophthora cactorum (formerly P. citricola), Phytophthora meadii, Phytophthora phaseoli, Phytophthora plurivora; White rust pathogens Albugo candida and Albugo laibachii; Downy mildew pathogens Bremia lactucae, Hyaloperonospora arabidopsidis, Pseudoperonospora cubensis, Plasmopara halstedii, Plasmopara obducens, Plasmopara viticola, Plasmopara halstedii, Peronophythora litchi, Peronospora manshurica, Peronosclerospora sorghi, Plasmodiophora brassicae, Peronospora belbahrii, Pseudoperonospora humuli, Hyaloperonospora brassicae; root rot pathogen Aphanomyces euteiches; Damping off and root rot pathogens Pythium ultimum, Pythium aphanidermatum, Pythium oligandrum, Brown stripe downy mildew pathogen of Barley and Maize Sclerophthora rayssiae.

[0754] The above-identified fungal diseases (and corresponding orthologous target genes) are illustrative and non-limiting.

[0755] Thus, other illustrative fungal diseases herein include, for example, Sclerotinia rots (S. sclerotiorum and S. minor), Sclerotium rots (Sclerotium rolfsii and S. cepivorum), Fusarium wilts and rots (various Fusarium species including F. solani and F. oxysporum), Botrytis rots (e.g., Grey mould (Botrytis cinerea), Anthracnose (Colletotrichum spp. except for in lettuce—Microdochium panattonianum), Rhizoctonia rots (e.g., Rhizoctonia solani)—range of common names, e.g. Bottom rot (lettuce) and Wire stem (Brassicas), Damping-off (Pythium, Rhizoctonia, Phytophthora, Fusarium or Aphanomyces), Cavity spot (e.g., Pythium sulcatum), Tuber diseases, Black root rot, Target spot, Aphanomyces root rot (e.g., Aphanomyces euteiches pv. phaseoli (beans), Aschochyta collar rot (peas), Gummy stem blight (e.g., Didymella bryoniae (cucurbits)), alternaria leaf spot (e.g., Alternaria cucumerina, A. alternata), black leg (e.g., Leptosphaeria maculans (brassicas)), ring spot (e.g., Mycosphaerella brassicicola (brassicas)), late blight (e.g., Septoria apiicola (celery)), cercospora leaf spot (e.g. Cercospora beticola (beets)), leaf blight (e.g., Septoria petroelini (parsley)), septoria spot (e.g., Septoria lactucae (lettuce)), leaf blight (e.g., Stemphylium vesicarium (spring onions)), leaf blight (e.g., Alternaria dauci (carrots)), and the like).

[0756] In certain embodiments, the target gene ortholog is a gene found in a fungus selected from the genus Alternaria, Aphanomyces, Arthraocladiella, Ashbya, Aspergillus, Beauveria, Bipolaris, Blumeria, Botryotinia, Botrytis, Brasiliomyces, Ceratocystis, Cercospora, Chaetomium, Cladosporium, Claviceps, Coccidioides, Cochiobolus, Colletotrichum, Cordyceps, Corticum, Corynespora, Cryptococcus, Cycloconium, Cystotheca, Dematophora, Diaporthe, Diplocarpon, Diplodia, Drecshlera, Elsinoe, Endocarpon, Erysiphe, Esca, Eutypa, Exophiala, Exserophilum, Fusarium, Gaeumannomyces, Geotrichum, Gibberella, Glomerella, Guignardia, Golovinomyces, Helminthosporium, Isariopsis, Lachancea, Leptosphaeria, Leveillula, Macrophomina, Magnaporthe, Marssonina, Metarhizium, Microsphaera, Monographella, Myceliophthora, Mycosphaerella, Neoerysiphe, Neurospora, Oidium, Paracoccidioides, Parauncinula, Penicillium, Phaeosphaeria, Phakospora, Phomopsis, Phyllactinia, Pleochaeta, Podosphaera, Podospora, Pseudocercospora., Pseudopeziza, Psuedoidium, Puccinia, Pyrenophora, Pyricularia, Ramularia, Rhizoctonia, Rhizopus, Saccharomyces, Sawadaea, Schizsaccharomyces, Sclerotinia, Sclerotium, Sordaria, Stagonospora, Talaromyces, Taphrina, Thielavia, Trichoderma, Ustilago, Venturia, Verticillium, Zygosaccharomyces, Zymoseptoria, and the like.

[0757] In certain embodiments, the target gene ortholog is a gene found in selected from the group consisting of Alternaria alternata, Alternaria solani, Aphanomyces cochioides, Ashbya gossypii, Aspergillus flavus, Beauveria bassiana, Bipolaris maydis, Bipolaris sorokiniana, Blumeria graminis, Blumeria graminis, Botryotinia fuckeliana, Botrytis cinerea, Bremia lactucae, Cercospora beticola, Cercospora kikuchii, Cercospora sojina, Cercospora zea maydis, Chaetomium globosum, Claviceps purpurea, Coccidioides posadasi, Cochliobolus heterostrophus, Colletotrichum gloeosporioides, Colletotrichum graminicola, Colletotrichum higginsianum, Colletotrichum orbiculare, Cordyceps militaris, Diplodia maydis, Drechsiera oryzae, Drechslera glycines, Endocarpon pusillum, Erysiphe betae, Erysiphe necator, Erysiphe pisi, Exophiala dermatitidis, Exserohilum turcicum, Fusariumfujikuroi, Fusarium graminearum, Fusarium moniliforme, Fusarium oxysporum, Fusarium solani, Gaeumannomyces graminis, Golovinomyces cichoracearum, Golovinomyces cichoracearum, Lachancea thermotoleran, Leptosphaeria maculans, Leveillula taurica, Macrophomina phaseolina, Magnaporthe grisea, Magnaporthe oryzae, Marssonina brunnea, Metarhizium acridum, Metarhizium anisopliae, Microsphaera diffusa, Monographella albescens, Myceliophthora thermophile, Paracoccidioides brasiliensis, Penicillium spp., Phaeoshaeria maydis, Phaeosphaeria nodorum, Phakopsora pachyrhizi, Phytophthora infestans, Podosphaera xanthii, Pseudocercospora fijiensis, Puccinia graminis, Puccinia polysora, Puccinia striiformis, Puccinia triticina, Pyrenophora teres, Pyrenophora tritici-repentis, Pyricularia oryzae, Pythium ultimum, Ramularia beticola, Rhizoctonia oryzae, Rhizoctonia solani, Saccharomyces arboricola, Schizsacchaormyces japonicus, Sclerotinia sclerotiorum, Sclerotium rolfsii, Sordaria macrospora, Sphaerotheca pannosa, Talaromyces marneffei, Talaromyces stipitatus, Thielavia terrestris, Trichoderma vireos, Ustilago hordei, Ustilago maydis, Venturia inaequalis, Verticillium albo-atrum, Verticillium alfalfa, Verticillium dahlia, Verticillium dahliae, Zygosaccharomyces bailii, Zygosaccharomyces rouxii, Zymoseptoria tritici, and the like. In certain embodiments, the target gene may be a gene in a fungus selected from the genus Candida such as Candida albicans, Candida glabrata, Candida orthopsilosis, Candida parapsilosis, or Candida tropicalis.

[0758] In certain embodiments, the fungal genes described herein may serve in the finding of not yet identified gene(s) of phytopathogenic fungi, e.g., via conserved sequences.

[0759] In certain embodiments the phytopathogen comprise a bacterial phytopathogen, e.g., Erwinia sp., Pectobacterium, Pantoea, Agrobacterium, Pseudomonas, Ralstonia, Burkholderia, Acidovorax, Xanthomonas, Clavibacter, Streptomyces, Xylella, Spiroplasma, and Phytoplasma., streptomyces, Bacillus, Clostridium, Candidatus, Pectobacterium.

[0760] In certain embodiments, the target gene ortholog is an ortholog found in a nematod phytopathogen. In certain embodiments the nematode phytopathogen is from the group of e.g., Root-knot nematodes (Meloidogyne spp.); Cyst nematodes (Heterodera and Globodera spp.); Root lesion nematodes (Pratylenchus spp.); Burrowing nematode Radopholus similis; Ditylenchus dipsaci; The pine wilt nematode Bursaphelenchus xylophilus; The reniform nematode Rotylenchulus reniformis; Xiphinema index; Nacobbus aberrans; Aphelenchoides besseyi; Hirschmaniella spp.; Ancylostoma; Anisakid; Aphelenchoides spp.; a nematode which is a plant pathogenic nematode, such as but not limited to Meloidogyne spp. (e.g., M. incognita, M. javanica, M. graminicola, M. arenaria, M. chitwoodi, M. hapla or M. paranaensis); Heterodera spp. (e.g., H. oryzae, H. glycines, H. zeae or H. schachtii); Globodera spp. (e.g., G. pallida or G. rostochiensis); Roty-lenchulus spp. (e.g., R. reniformis); Pratylenchus spp. (e.g., P. coffeae, P. Zeae or P. goodeyi); Radopholus spp. (e.g., R. similis); Hirschmaniella spp. (e.g., H. oryzae), Ancylostoma spp. (e.g., A. caninum, A. ceylanicum, A. duodenale or A. tubaeforme); Anisakid; Aphelenchoides spp. (e.g., A. Besseyi); Ascarids; Ascaris spp., (e.g., A. suum or A. lum-bridoides); Belonolaimus spp.; Brugia spp. (e.g., B. malayi or B. pahangi); Bursaphelenchus spp.; Caenorhabditis spp. (e.g., C. elegans, C. briggsae or C. remand); Clostridium spp. (e.g., C. acetobutylicum); Cooperia spp. (e.g., C. onco-phora)′, Criconemoides spp.; Cyathostomum spp. (e.g., C. catinatum, C. coronation or C. pateratum); Cylicocyclus spp. (e.g., C. insigne, C. nassatus or C. radiatus)′, Cyli-costephanus spp. (e.g., C. goldi or C. longibursatus); Diphyllobothrium; Dirofilaria spp. (e.g., D. immitis); Ditylenchus spp. (e.g., I), dipsaci, I), destructor or D. augustus); Entero-bius spp. (e.g., E. vermicularis); Haemonchus spp. (e.g., H. contortus); Hirschmanniella spp., Helicotylenchus spp.; Hoplolaimus spp.; Lito-mosoides spp. (e.g., L. sigmodontis); Longidorus spp. (e.g., L. macrosoma); Necator spp. (e.g., N. americanus)′, Nip-postrongylus spp. (e.g., N. brasiliensis)′, Onchocerca spp. (e.g., O. volvulus)′, Ostertagia spp. (e.g., O. ostertagi); Paras-trongyloides spp. (e.g., P. trichosuri)′, Paratrichodorus spp. (e.g., P. minor or P. teres); Parelaphostrongylus spp. (e.g., P. tenuis); Radophulus spp.; Rotylenchulus spp.; Scutellonerna. spp.; Strongyloides spp. (e.g., S′. ratti or S. stercoralis); Teladorsagia spp. (e.g., T. circumcincta); Toxascaris spp. (e.g., T. leonina); Toxocara spp. (e.g., T. canis or T. cati); Trichinella spp. (e.g., T. britovi, T. spiralis or T. spirae); Trichodorus spp. (e.g., T. similis); Trichuris spp. (e.g., T. muris, T. vulpis or T. trichiura); Tylenchulus spp.; Tylenchorhynchus spp.; Uncinaria spp. (e.g., U. stenocephala); Wuchereria spp. (e.g., W. Bancrofti) Xiphinema spp. (e.g., X. index or X. americanum), and the like.

[0761] In certain embodiments, the target gene ortholog is an ortholog found in an insect pest. In another embodiment, the insect pests is from the Subphyla Chelicerata, Myriapoda, and/or Hexapoda. In yet another embodiment, insect pest belongs to the Classes of Arachnida, Symphyla, and/or Insecta. In another embodiment, the ortholog is selected from the insect from Order Homoptera.

[0762] In another embodiment, the insect pest is from the Order Anoplura. Non-limiting examples of genera may include, but are not limited to, Haematopinus spp., Hoplopleura spp., Linognathus spp., Pediculus spp., and Polyplax spp. Non-limiting examples of species may include, but are not limited to, Haematopinus asini, Haematopinus suis, Linognathus setosus, Linognathus ovillus, Pediculus humanus capitis, Pediculus humanus humanus, and Pthirus pubis.

[0763] In yet another embodiment, the insect pest is from the Order Coleoptera. Non-limiting examples of genera may include, but are not limited to, Acanthoscelides spp., Agriotes spp., Anthonomus spp., Apion spp., Apogonia spp., Aulacophora spp., Bruchus spp., Cerosterna spp., Cerotoma spp., Ceutorhynchus spp., Chaetocnema spp., Colaspis spp., Ctenicera spp., Curculio spp., Cyclocephala spp., Diabrotica spp., Hypera spp., Ips spp., Lyctus spp., Megascelis spp., Meligethes spp., Otiorhynchus spp., Pantomorus spp., Phyllophaga spp., Phyllotreta spp., Rhizotrogus spp., Rhynchites spp., Rhynchophorus spp., Scolytus spp., Sphenophorus spp., Sitophilus spp., and Tribolium spp. Non-limiting examples of species may include, but are not limited to, Acanthoscelides obtectus, Agrilus planipennis, Anoplophora glabripennis, Anthonomus grandis, Ataenius spretulus, Atomaria linearis, Bothynoderes punctiventris, Bruchus pisorum, Callosobruchus maculatus, Carpophilus hemipterus, Cassida vittata, Cerotoma trifurcata, Ceutorhynchus assimilis, Ceutorhynchus napi, Conoderus scalaris, Conoderus stigmosus, Conotrachelus nenuphar, Cotinis nitida, Crioceris asparagi, Cryptolestes ferrugineus, Cryptolestes pusillus, Cryptolestes turcicus, Cylindrocopturus adspersus, Deporaus marginatus, Dermestes lardarius, Dermestes maculatus, Epilachna varivestis, Faustinus cubae, Hylobius pales, Hypera postica, Hypothenemus hampei, Lasioderma serricorne, Leptinotarsa decemlineata, Liogenys fuscus, Liogenys suturalis, Lissorhoptrus oryzophilus, Maecolaspis joliveti, Melanotus communis, Meligethes aeneus, Melolontha melolontha, Oberea brevis, Oberea linearis, Oryctes rhinoceros, Oryzaephilus mercator, Oryzaephilus surinamensis, Oulema melanopus, Oulema oryzae, Phyllophaga cuyabana, Popillia japonica, Prostephanus truncatus, Rhyzopertha dominica, Sitona lineatus, Sitophilus granarius, Sitophilus oryzae, Sitophilus zeamais, Stegobium paniceum, Tribolium castaneum, Tribolium confusum, Trogoderma variabile, and Zabrus tenebrioides.

[0764] In an alternative embodiment, the insect pest is from the Order Dermaptera. In another embodiment, the insect pest is from the Order Blattaria. Non-limiting examples of species may include, but are not limited to, Blattella germanica, Blatta orientalis, Parcoblatta pennsylvanica, Periplaneta americana, Periplaneta australasiae, Periplaneta brunnea, Periplaneta fuliginosa, Pycnoscelus surinamensis, and Supella longipalpa.

[0765] In yet another embodiment, the insect pest is from the Order Diptera. Non-limiting examples of genera may include, but are not limited to, Aedes spp., Agromyza spp., Anastrepha spp., Anopheles spp., Bactrocera spp., Ceratitis spp., Chrysops spp., Cochliomyia spp., Contarinia spp., Culex spp., Dasineura spp., Delia spp., Drosophila spp., Fannia spp., Hylemyia spp., Liriomyza spp., Musca spp., Phorbia spp., Tabanus spp., and Tipula spp. Non-limiting examples of species may include, but are not limited to, Agromyza frontella, Anastrepha suspensa, Anastrepha ludens, Anastrepha obliqa, Bactrocera cucurbitae, Bactrocera dorsalis, Bactrocera invadens, Bactrocera zonata, Ceratitis capitata, Dasineura brassicae, Delia platura, Fannia canicularis, Fannia scalaris, Gasterophilus intestinalis, Gracillia perseae, Haematobia irritans, Hypoderma lineatum, Liriomyza brassicae, Melophagus ovinus, Musca autumnalis, Musca domestica, Oestrus ovis, Oscinella frit, Pegomya betae, Psila rosae, Rhagoletis cerasi, Rhagoletis pomonella, Rhagoletis mendax, Sitodiplosis mosellana, and Stomoxys calcitrans.

[0766] In a particular embodiment, the insect pest is from the Order Hemiptera. Non-limiting examples of genera may include, but are not limited to, Adelges spp., Aulacaspis spp., Aphrophora spp., Aphis spp., Bemisia spp., Ceroplastes spp., Chionaspis spp., Chrysomphalus spp., Coccus spp., Empoasca spp., Lepidosaphes spp., Lagynotomus spp., Lygus spp., Macrosiphum spp., Nephotettix spp., Nezara spp., Philaenus spp., Phytocoris spp., Piezodorus spp., Planococcus spp., Pseudococcus spp., Rhopalosiphum spp., Saissetia spp., Therioaphis spp., Toumeyella spp., Toxoptera spp., Trialeurodes spp., Triatoma spp. and Unaspis spp. Non-limiting examples of species may include, but are not limited to, Acrosternum hilare, Acyrthosiphon pisum, Aleyrodes proletella, Aleurodicus dispersus, Aleurothrixus floccosus, Amrasca biguttula biguttula, Aonidiella aurantii, Aphis gossypii, Aphis glycines, Aphis pomi, Aulacorthum solani, Bemisia argentifolii, Bemisia tabaci, Blissus leucopterus, Brachycorynella asparagi, Brevennia rehi, Brevicoryne brassicae, Calocoris norvegicus, Ceroplastes rubens, Cimex hemipterus, Cimex lectularius, Dagbertus fasciatus, Dichelops furcatus, Diuraphis noxia, Diaphorina citri, Dysaphis plantaginea, Dysdercus suturellus, Edessa meditabunda, Eriosoma lanigerum, Eurygaster maura, Euschistus heros, Euschistus servus, Helopeltis antonii, Helopeltis theivora, Icerya purchasi, Idioscopus nitidulus, Laodelphax striatellus, Leptocorisa oratorius, Leptocorisa varicomis, Lygus hesperus, Maconellicoccus hirsutus, Macrosiphum euphorbiae, Macrosiphum granarium, Macrosiphum rosae, Macrosteles quadrilineatus, Mahanarva frimbiolata, Metopolophium dirhodum, Mictis longicomis, Myzus persicae, Nephotettix cinctipes, Neurocolpus longirostris, Nezara viridula, Nilaparvata lugens, Parlatoria pergandii, Parlatoria ziziphi, Peregrinus maidis, Phylloxera vitifoliae, Physokermes piceae, Phytocoris californicus, Phytocoris relativus, Piezodorus guildinii, Poecilocapsus lineatus, P. sallus vaccinicola, Pseudacysta perseae, Pseudococcus brevipes, Quadraspidiotus perniciosus, Rhopalosiphum maidis, Rhopalosiphum padi, Saissetia oleae, Scaptocoris castanea, Schizaphis graminum, Sitobion avenae, Sogatella furcifera, Trialeurodes vaporariorum, Trialeurodes abutiloneus, Unaspis yanonensis, and Zulia entrerriana.

[0767] In another embodiment, the insect pest is from the Order Hymenoptera. Non-limiting examples of genera may include, but are not limited to, Acromyrmex spp., Atta spp., Camponotus spp., Diprion spp., Formica spp., Monomorium spp., Neodiprion spp., Pogonomyrmex spp., Polistes spp., Solenopsis spp., Vespula spp., and Xylocopa spp. Non-limiting examples of species may include, but are not limited to, Athalia rosae, Atta texana, Iridomyrmex humilis, Monomorium minimum, Monomorium pharaonis, Solenopsis invicta, Solenopsis geminata, Solenopsis molesta, Solenopsis richtery, Solenopsis xyloni, and Tapinoma sessile.

[0768] In an alternative embodiment, the insect pest is from the Order Isoptera. Non-limiting examples of genera may include, but are not limited to, Coptotermes spp., Cornitermes spp., Cryptotermes spp., Heterotermes spp., Kalotermes spp., Incisitermes spp., Macrotermes spp., Marginitermes spp., Microcerotermes spp., Procomitermes spp., Reticulitermes spp., Schedorhinotermes spp., and Zootermopsis spp. Non-limiting examples of species may include, but are not limited to, Coptotermes curvignathus, Coptotermes frenchi, Coptotermes formosanus, Heterotermes aureus, Microtermes obesi, Reticulitermes banyulensis, Reticulitermes grassei, Reticulitermes flavipes, Reticulitermes hageni, Reticulitermes hesperus, Reticulitermes santonensis, Reticulitermes speratus, Reticulitermes tibialis, and Reticulitermes virginicus.

[0769] In another embodiment, the insect pest is from the Order Lepidoptera. Non-limiting examples of genera may include, but are not limited to, Adoxophyes spp., Agrotis spp., Argyrotaenia spp., Cacoecia spp., Caloptilia spp., Chilo spp., Chrysodeixis spp., Colias spp., Crambus spp., Diaphania spp., Diatraea spp., Earias spp., Ephestia spp., Epimecis spp., Feltia spp., Gortyna spp., Helicoverpa spp., Heliothis spp., Indarbela spp., Lithocolletis spp., Loxagrotis spp., Malacosoma spp., Peridroma spp., Phyllonorycter spp., Pseudaletia spp., Sesamia spp., Spodoptera spp., Synanthedon spp., and Yponomeuta spp. Non-limiting examples of species may include, but are not limited to, Achaea janata, Adoxophyes orana, Agrotis ipsilon, Alabama argillacea, Amorbia cuneana, Amyelois transitella, Anacamptodes defectaria, Anarsia lineatella, Anomis sabulifera, Anticarsia gemmatalis, Archips argyrospila, Archips rosana, Argyrotaenia citrana, Autographa gamma, Bonagota cranaodes, Borbo cinnara, Bucculatrix thurberiella, Capua reticulana, Carposina niponensis, Chlumetia transversa, Choristoneura rosaceana, Cnaphalocrocis medinalis, Conopomorpha cramerella, Cossus cossus, Cydia caryana, Cydia funebrana, Cydia molesta, Cydia nigricana, Cydia pomonella, Darna diducta, Diatraea saccharalis, Diatraea grandiosella, Earias insulana, Earias vittella, Ecdytolopha aurantianum, Elasmopalpus lignosellus, Ephestia cautella, Ephestia elutella, Ephestia kuehniella, Epinotia aporema, Epiphyas postvittana, Erionota thrax, Eupoecilia ambiguella, Euxoa auxiliaris, Grapholita molesta, Hedylepta indicata, Helicoverpa armigera, Helicoverpa zea, Heliothis virescens, Hellula undalis, Keiferia lycopersicella, Leucinodes orbonalis, Leucoptera coffeella, Leucoptera malifoliella, Lobesia botrana, Loxagrotis albicosta, Lymantria dispar, Lyonetia clerkella, Mahasena corbetti, Mamestra brassicae, Maruca testulalis, Metisa plana, Mythimna unipuncta, Neoleucinodes elegantalis, Nymphula depunctalis, Operophtera brumata, Ostrinia nubilalis, Oxydia vesulia, Pandemis cerasana, Pandemis heparana, Papilio demodocus, Pectinophora gossypiella, Peridroma saucia, Perileucoptera coffeella, Phthorimaea operculella, Phyllocnistis citrella, Pieris rapae, Plathypena scabra, Plodia interpunctella, Plutella xylostella, Polychrosis viteana, Prays endocarpa, Prays oleae, Pseudaletia umpuncta, Pseudoplusia includens, Rachiplusia nu, Scirpophaga incertulas, Sesamia inferens, Sesamia nonagrioides, Setora nitens, Sitotroga cerealella, Sparganothis pilleriana, Spodoptera exigua, Spodoptera frugiperda, Spodoptera eridania, Thecla basilides, Tineola bisselliella, Trichoplusia ni, Tuta absoluta, Zeuzera coffeae, and Zeuzera pyrina.

[0770] In a particular embodiment, the insect pest is from the Order Mallophaga. Non-limiting examples of genera may include, but are not limited to, Anaticola spp., Bovicola spp., Chelopistes spp., Goniodes spp., Menacanthus spp., and Trichodectes spp. Non-limiting examples of species may include, but are not limited to, Bovicola bovis, Bovicola caprae, Bovicola ovis, Chelopistes meleagridis, Goniodes dissimilis, Goniodes gigas, Menacanthus stramineus, Menopon gallinae, and Trichodectes canis.

[0771] In another embodiment, the insect pest is from the Order Orthoptera. Non-limiting examples of genera may include, but are not limited to, Melanoplus spp., and Pterophylla spp. Non-limiting examples of species may include, but are not limited to, Anabrus simplex, Gryllotalpa africana, Gryllotalpa australis, Gryllotalpa brachyptera, Gryllotalpa hexadactyla, Locusta migratoria, Microcentrum retinerve, Schistocerca gregaria, and Scudderia furcata.

[0772] In yet another embodiment, the insect pest is from the Order Siphonaptera. Non-limiting examples of species may include, but are not limited to, Ceratophyllus gallinae, Ceratophyllus niger, Ctenocephalides canis, Ctenocephalides felis, and Pulex irritans.

[0773] In an alternative embodiment, the insect pest is from the Order Thysanoptera. Non-limiting examples of genera may include, but are not limited to, Caliothrips spp., Frankliniella spp., Scirtothrips spp., and Thrips spp. Non-limiting examples of species may include, but are not limited to, Frankliniella fusca, Frankliniella occidentalis, Frankliniella schultzei, Frankliniella williamsi, Heliothnps haemorrhoidalis, Rhipiphorothnps cruentatus, Scirtothrips citri, Scirtothrips dorsalis, and Taeniothrips rhopalantennalis, Thrips hawaiiensis, Thrips nigropilosus, Thrips orientalis, Thrips tabaci.

[0774] In another embodiment, the insect pest is from the Order Thysanura. Non-limiting examples of genera may include, but are not limited to, Lepisma spp. and Thermobia spp.

[0775] In yet another embodiment, the insect pest is from the Order Acarina. Non-limiting examples of genera may include, but are not limited to, Acarus spp., Aculops spp., Boophilus spp., Demodex spp., Dermacentor spp., Epitrimerus spp., Eriophyes spp., Ixodes spp., Oligonychus spp., Panonychus spp., Rhizoglyphus spp., and Tetranychus spp. Non-limiting examples of species may include, but are not limited to, Acarapis woodi, Acarus siro, Aceria mangiferae, Aculops lycopersici, Aculus pelekassi, Aculus schlechtendali, Amblyomma americanum, Brevipalpus obovatus, Brevipalpus phoenicis, Dermacentor variabilis, Dermatophagoides pteronyssinus, Eotetranychus carpini, Notoedres cati, Oligonychus coffeae, Oligonychus ilicis, Panonychus citri, Panonychus ulmi, Phyllocoptruta oleivora, Polyphagotarsonemus latus, Rhipicephalus sanguineus, Sarcoptes scabiei, Tegolophus perseaflorae, Tetranychus urticae, and Varroa destructor.

[0776] In a particular embodiment, the insect pest is from the Order Symphyla. Non-limiting examples of species may include, but are not limited to, Scutigerella immaculata.

[0777] In certain embodiments, the target gene ortholog is an ortholog that shares at least 35%, or at least 50% sequence identity, or at least 60% sequence identity, or at least 70% sequence identity, or at least 80% sequence identity, or at least 85% sequence identity, or at least 90% sequence identity, or at least 95% sequence identity with the corresponding reference gene e.g., a gene listed in Table 1 and/or Table 2). In certain embodiments the target gene orgholog can show less than 35% sequence when the when the E value is <E-10. identity In certain embodiments, the target gene ortholog encodes a protein that shares at least 70% sequence identity, or at least 75% sequence identity, or at least 80% sequence identity, or at least 85% sequence identity, or at least 90% sequence identity, or at least 95% sequence identity, or at least 98% sequence identity with a protein expressed by the corresponding reference gene e.g., a gene listed in Table 1 and/or Table 2).

[0778] The foregoing target genes are illustrative and non-limiting. Using the teaching provided herein, numerous other target genes downregulation of which can inhibit a phytopathogen can readily be identified using the methods described herein.

### Gene Silencing—Inhibitory Polynucleotides.

[0779] In various embodiments, the agent that down-regulates expression of one or more genes described herein comprises an agent that induces gene silencing of the target gene(s). “Gene silencing” is a general term used to describe the regulation of gene expression. In particular, this term refers to the ability of a cell to prevent the expression of a gene in the cell. Gene silencing can occur during either transcription or translation of a gene. The application of gene silencing methods in plants is well known in the art. Reference is made to Plant Gene Silencing—Methods and Protocols, Mysore K. S and Senthil-Kumar M. (eds.), Springer Protocols, Humana Press, 2015, which provides a comprehensive review of various gene silencing methodologies and its applications. In various embodiments, the skilled person may apply any methods described in this document or elsewhere that are suitable to achieve gene silencing in a plant and in a fungus.

[0780] In certain embodiments, RNA silencing is used to down regulate the target gene(s) described herein. “RNA silencing” refers to a group of regulatory mechanisms (e.g. RNA interference (RNAi), transcriptional gene silencing (TGS), post-transcriptional gene silencing (PTGS), quelling, co-suppression, and translational repression] mediated by RNA molecules that result in the inhibition or “silencing” of the expression of a corresponding protein-coding gene. RNA silencing has been observed in many types of organisms, including plants, animals, and fungi.

[0781] As used herein, the term “RNA silencing agent” refers to an RNA which is capable of inhibiting or “silencing” the expression of a target gene. In certain embodiments, the RNA silencing agent is capable of preventing complete processing (e.g., the full translation and/or expression) of an mRNA molecule through a post-transcriptional silencing mechanism. RNA silencing agents include noncoding RNA molecules, for example RNA duplexes comprising paired strands, as well as precursor RNAs from which such small non-coding RNAs can be generated. Illustrative RNA silencing agents include, but are not limited to dsRNAs such as siRNAs, miRNAs and shRNAs. In one embodiment, the RNA silencing agent is capable of inducing RNA interference. In another embodiment, the RNA silencing agent is capable of mediating translational repression.

[0782] RNA interference refers to the process of sequence-specific post-transcriptional gene silencing in animals mediated by short interfering RNAs (siRNAs). The corresponding process in plants is commonly referred to as post-transcriptional gene silencing or RNA silencing and is also referred to as quelling in fungi. The process of post-transcriptional gene silencing is thought to be an evolutionarily conserved cellular defense mechanism used to prevent the expression of foreign genes and is commonly shared by diverse flora and phyla.

[0783] The presence of long double stranded RNAs (dsRNAs) in cells stimulates the activity of a ribonuclease III enzyme referred to as dicer. Dicer is involved in the processing of the dsRNA into short pieces of dsRNA known as short interfering RNAs (siRNAs). Short interfering RNAs derived from dicer activity are typically about 21 to about 23 nucleotides in length and comprise about 19 base pair duplexes. The RNAi response also features an endonuclease complex, commonly referred to as an RNA-induced silencing complex (RISC), which mediates cleavage of single-stranded RNA having sequence complementary to the antisense strand of the siRNA duplex. Cleavage of the target RNA takes place in the middle of the region complementary to the antisense strand of the siRNA duplex.

[0784] Accordingly in various embodiment nucleic acids and/or nucleic acid constructs for silencing one or more of the target genes identified herein (see, e.g., Table 2) or homologs and/or orthologs thereof as described herein are provided.

[0785] Accordingly, in certain embodiments, an isolated double stranded RNA (dsRNA) for controlling or preventing an infection of a plant by a phytopathogen (e.g., a phytopathogenic fungus) is provided. In certain embodiments, the dsRNA downregulates (is capable of downregulating) expression of one or more target G. orontii genes identified in Table 2 or homologs/orthologs thereof.

[0786] In certain embodiments, the isolated dsRNA molecule comprises two annealed complementary RNA strands. In certain embodiments, the double-stranded RNA molecule comprises a nucleotide sequence that is complementary to at least 17, 19 or 21 contiguous nucleotides of one or more of said target G. orontii genes (e.g., the genes shown in Table 1 and/or Table 2) or homologs/orthologs thereof, or an RNA transcribed therefrom. In certain embodiments, the double-stranded RNA molecule comprises a nucleotide sequence that is complementary to at least 17, or at least about 18, or at least about 19, or at least about 20, or at least about 21 to up to about 2000, or up to about 1000, or up to about 500, or up to about 300, or up to about 200, or up to about 100 contiguous nucleotides of the target G. orontii genes or target G. orontii gene orthologs, or an RNA transcribed therefrom. In certain embodiments the double-stranded RNA molecule comprises a nucleotide sequence that is complementary to 17 up to 500, or 17 up to 2000, or 21 up to 2000, or 17 up to 100, or 21 up to 200, or 50 up to 300, or 100 up to 1000, or 100 up to 1500, or 200 up to 2000 contiguous nucleotides of the target G. orontii genes or target G. orontii gene orthologs, or an RNA transcribed therefrom. In certain embodiments, the isolated dsRNA molecule comprises a nucleic acid sequence complementary to about 15 to 100, 19 to 100, 20 to 200, 17 to 500, 100 to 1000 or complementary to about 200 to 1,000, or complementary to about 200 to 650 contiguous nucleotides of the protein coding region of the target G. orontii genes or target G. orontii gene orthologs or an RNA transcribed therefrom. In certain embodiments, the dsRNA comprises a nucleic acid sequence complementary to about 17 to 1000 or complementary to about 200 to 1,000, or complementary to about 100 to 650 contiguous nucleotides of the 5′ UTR region or the 3′ UTR region said target G. orontii genes or target G. orontii gene orthologs.

[0787] In certain embodiments, the dsRNA comprises a nucleic acid sequence complementary to a contiguous region comprising at least about 0.1%, 0.5%, 1%, 2%, 3%, 5%, 10%, 15%, 20%, 25%, 50%, 60%, 70%, 80%, 90%, 95%, 98%, 99%, or 100% of the length of the target gene sequence protein coding region, 5′ UTR region, or 3′ UTR region of said target G. orontii genes or target G. orontii gene orthologs.

[0788] In certain embodiments, the dsRNA molecule comprises a single RNA strand comprising an inversely repeated sequence with a spacer in between and wherein the single RNA strand can anneal to itself to form a hairpin loop structure (shRNA). In certain embodiments, the shRNA is about 30 nucleotides or shorter in length. In certain embodiments, the shRNA is longer in length, e.g., up to 1000 nt. In certain embodiments, the shRNA ranges in length from about 25-29 nucleotides in length. In certain embodiments, the shRNA comprises a duplex length ranging from bout 17-21 nucleotides or from about 18-23 nucleotides, or from about 19-21 nucleotides. In certain embodiments, the shRNA comprises a loop sequence ranging from 3 to 9 nucleotides in length or has a loop length of 5, 7, or 9 nucleotides.

[0789] In certain embodiments, the dsRNA comprises an miRNA. miRNAs are small RNAs made from genes encoding primary transcripts of various sizes. They have been identified in both animals and plants. The primary transcript (termed the “pri-miRNA”) is processed through various nucleolytic steps to a shorter precursor miRNA, or “pre-miRNA.” The pre-miRNA is present in a folded form so that the final (mature) miRNA is present in a duplex, the two strands being referred to as the miRNA (the strand that will eventually basepair with the target). The pre-miRNA is a substrate for a form of dicer that removes the miRNA duplex from the precursor, after which, similarly to siRNAs, the duplex can be taken into the RISC complex. It has been demonstrated that miRNAs can be transgenically expressed and be effective through expression of a precursor form, rather than the entire primary form (see, e.g., Parizotto et al. (2004) Genes Dev. 18: 2237-2242; Guo et al. (2005) Plant Cell 17: 1376-1386; and the like).

[0790] Unlike, siRNAs, miRNAs bind to target gene or to target gene transcript sequences with only partial complementarity (Zeng et al. (2002) Molec. Cell, 9: 1327-1333) and repress translation without affecting steady-state RNA levels (see, e.g., Lee et al. (1993) Cell, 75: 843-854; Wightman et al. (1993) Cell 75: 855-862). Both miRNAs and siRNAs are processed by Dicer and associate with components of the RNA-induced silencing complex (Hutvagner et al. (2001) Science 293: 834-838; Grishok et al. (2001) Cell, 106: 23-34; Ketting et al. (2001) Genes Dev. 15: 2654-2659; Williams et al. (2002) Proc. Natl. Acad. Sci. USA 99: 6889-6894; Hammond et al. (2001) Science, 293: 1146-1150; Mourlatos et al. (2002) Genes Dev. 16: 720-728).

[0791] Target sites are recognized by an miRNA primarily by sequence pairing with the “seed” region, typically comprising positions 2-7 of miRNA's 5′ end. In various embodiments 6-8 ntd complete complementarity in the miRNA is desirable to to provide effective translation inhibition.

[0792] In various embodiments, the dsRNA is capable of reducing infection, growth, and/or spore production of a phytopathogen comprising a gene that the dsRNA downregulates. In certain embodiments, the dsRNA capable of reducing hyphal length of a phytopathogen comprising a gene that the dsRNA downregulates.

[0793] The dsRNAs described herein and/or DNAs encoding the dsRNAs are readily produced using routine methods known to those of skill in the art. Thus, for example, in various embodiments, the dsRNAs described herein can be generated according to any polynucleotide synthesis method known in the art such as enzymatic synthesis or solid phase synthesis. Equipment and reagents for executing solid-phase synthesis are commercially available from, for example, Applied Biosystems. Any other means for such synthesis may also be employed. The synthesis of the polynucleotides is well within the capabilities of one skilled in the art and can be accomplished via established methodologies as detailed in, for example, “Molecular Cloning: A laboratory Manual” Sambrook et al., (1989); “Current Protocols in Molecular Biology” Volumes I-III Ausubel, R. M., ed. (1994); Ausubel et al., “Current Protocols in Molecular Biology”, John Wiley and Sons, Baltimore, Md. (1989); Perbal, “A Practical Guide to Molecular Cloning”, John Wiley & Sons, New York (1988) and “Oligonucleotide Synthesis” Gait, M. J., ed. (1984) utilizing solid phase chemistry, e.g. cyanoethyl phosphoramidite followed by deprotection, desalting and purification by for example, an automated trityl-on method or HPLC.

[0794] In certain embodiments, following synthesis, the dsRNAs or DNAs encoding the dsRNAs described herein may optionally be purified. For example, dsRNAs or DNAs can be purified from a mixture by extraction with a solvent or resin, precipitation, electrophoresis, chromatography, or a combination thereof. Alternatively, polynucleotides may be used with no, or a minimum of, purification to avoid losses due to sample processing. In various embodiments, the dsRNAs may be dried for storage or dissolved in an aqueous solution. The solution may contain buffers or salts to promote annealing, and/or stabilization of the duplex strands.

[0795] It will be appreciated that in various embodiments, a dsRNA described herein can be provided per se, or as a nucleic acid construct comprising a nucleic acid sequence encoding the dsRNA. Typically, the nucleic acid construct comprises a promoter sequence which is functional in a host cell, as detailed herein below. The DNAs encoding the dsRNAs under the control of an operably linked promoter sequence, may further be flanked by additional sequences that advantageously affect its transcription and/or the stability of a resulting transcript. Such sequences are generally located upstream of the promoter and/or downstream of the 3′ end of the expression construct. Regulatory sequences for expression (transcription) of the dsRNA may include promoters, translation leader sequences, introns, enhancers, stem-loop structures, repressor binding sequences, termination sequences, pausing sequences, polyadenylation recognition sequences, and the like.

[0796] The foregoing dsRNAs are illustrative and non-limiting. Using the teachings provided herein numerous dsRNAs that can downregulate the target genes and/or target gene orthologs identified herein will be available to one of skill in the art.

### Compositions for Controlling or Preventing an Infection of a Plant by a Phytopathogen

[0797] In various embodiments, compositions for controlling or preventing an infection of a plant by a phytopathogen (e.g., a phytopathogenic fungus) are provided. Typically, in various embodiments, such compositions are applied to a plant at risk for infection by a phytopathogen, or after identification of infection by a phytopathogen.

[0798] In various embodiments, such compositions contain one or more of the dsRNAs described herein (e.g., a dsRNA that downregulates a target gene shown in Table 1 or Table 2 or that downregulates a homolog/ortholog of a gene shown in Table 1 or Table 2). In certain embodiments, the composition comprises a dsRNA or multiple dsRNAs that downregulates a single target gene. In certain embodiments, the composition comprises a dsRNA or dsRNAs that downregulates a target gene and orthologous target genes in the same species or other related species or strains. In certain embodiments, the composition comprises a single dsRNA has a plurality of domains that each downregulate a different target gene. In certain embodiments, the composition comprises a plurality of dsRNAs that each downregulate a different target gene. In certain embodiments, the composition comprises dsRNA(s) that downregulate 2, or 3, or 4, or 5, or 6, or 7, or 8, or 9, or 10 target gene(s).

[0799] In certain embodiments, the composition is formulated for spray on application to a plant to provide spray-induced gene silencing (SIGS). In certain embodiments, the composition is provided as a spray, a dust, drenches, drip application, granules, injecting into a plant and plant part, aerosol application, particle bombardment, a seed coating, or a plant-incorporated protectant.

[0800] In certain embodiments, the composition comprises said dsRNA(s) associated with particulate of any desirable size. In certain embodiments the particulate range in size from about 1 nanometer to about 100 micrometers. In certain embodiments the particulate is supported by, attached to, or embedded in a matrix.

[0801] In certain embodiments, the composition comprises said dsRNA(s) associated with a particle or nanoparticle (e.g., a clay or a polymer particle or nanoparticle). In certain embodiments, the particles or nanoparticles are of a size and composition selected to abrade the plant surface and facilitate entry of the dsRNA(s) into the plant. In certain embodiments the particle or nanoparticle control the release of said dsRNA overtime. In certain embodiments the particle or nanoparticle increases the availability and/or stability. In certain embodiments, the particle or nanoparticle increases the attachment of dsRNA on pathogen surface and/or increase the absorption of said dsRNA in pathogen.

[0802] In certain embodiments the particulate is selected from the group consisting of a mineral abrasive, a metal abrasive, a synthetic abrasive, and an organic abrasive. In certain embodiments the particulate is selected from the group consisting of aluminum oxide, silicon carbide, silicon dioxide, soda lime glass, diatomaceous silica (diatomaceous earth), flint, quartz, garnet, silicon dioxide, pumice, sand, feldspar, calcite, steel, tungsten, ceramic, boron carbide, tungsten carbide.

[0803] In certain embodiments, the particle or nanoparticle comprises a metal, metal oxides, metalloids, polymeric nanoparticles, carbon- or carbon-based material, silicon or silicon-based material, silica vesicles, dendrimers, quantum dots etc. In certain embodiments, the particle or nanoparticle comprises calcium phosphate or calcium carbonate. In certain embodiments, the particle or nanoparticle comprises clay minerals or clay complexes. In certain embodiments the particle or nanoparticle comprises the dsRNA loaded or adsorbed onto Layered Double Hydroxide (LDH) particles.

[0804] In certain embodiments the particles or nanoparticles are biopolymers. In some embodiments, the polymer is selected from the group consisting of but not limited to poly(acrylic acid), poly(methacrylic acid), poly (styrene sulfonate), chitosan, poly (dimethyldiallylammonium chloride), poly (allylamine hydrochloride), or copolymers or graft polymers thereof and combinations thereof. In certain embodiments the biopolymers are chitin or chitosan derivatives. In certain embodiments the dsRNA can be attached to chitosan particles or encapsulated with chitosan polymers. In certain embodiments the chitosan polymers can be allosperse. In some embodiments, at least a portion of the active ingredient (dsRNA) in the composition is in the interior of the polymer nanoparticle. In some embodiments, at least a portion of it is on the surface of the polymer nanoparticle.

[0805] In certain embodiments other nanomaterials used in compositions for application of the dsRNAs described herein can be oil-based, polymer-based, lipid-based, and porous inorganic nanomaterials. In certain embodiments the composition may comprise of cellulose and its modified forms e.g., microfibrillated cellulose. In certain embodiments, the composition comprises dsRNA(s) incorporated into a lipid or liposome, a functionalized liposome, protein matrix, or other biologically derived delivery platforms.

[0806] In certain embodiments, the compositions for delivery of the dsRNAs described herein composition comprise the inhibitory dsRNA molecule(s) described herein and a synthetic carrier or microbial conduit that can be a microorganism that has a natural capacity or is engineered to produce and/or deliver dsRNA to increase its bioavailability and/or biostability for causing RNA interference. In certain embodiments, dsRNA is encapsulated and delivered using an anucleated cell-based platform. In certain embodiments, RNA is produced and/or delivered in a microbial host where the microbial host can be a prokaryotic cell, a gram-negative bacterial cell, a gram-positive bacterial cell, or an eukaryotic cell. In certain embodiments, the microbes belong to the category of GRAS (Generally Recognized As Safe) microbes. In certain embodiments, the GRAS microbes are selected from the group of Bacillus, Corynebacterium, and Lactobacillus. In certain embodiments, dsRNA can be applied mixed with GRAS chemicals. In certain embodiments, applications of the dsRNAs described herein may be made as RNA mixed with fertilizers.

[0807] In certain embodiments, the composition applied on plant for controlling pathogen(s) comprises one or more dsRNAs described herein associated with a particulate of any size further applied with (a) at least one selected from the group consisting of water, a biocide, a chelator, a buffer, an ionic or nonionic surfactant, a zwitterionic surfactant, a defoamer, a rainfastness agent, and a photoprotectant, and/or (b) at least one selected from the group consisting of agricultural carrier agent, a surfactant, an organosilicone, and/or (c) at least one selected from the group consisting of adhesion agent, cmpatability agent, conditioning agent, wetting agent, spreading agent, extenders, stabilizer, preservative, a dessicant, dispersants, tackifiers, and emulsifiers; and/or (d) at least one selected from the group consisting of fertilizers, plant nutrients, plant growth regulators (PGRs) and biostimulants; and/or e) at least one pesticidal agent from a group of fungicides, antibacterials, insecticides, herbicides, and nematicides. In certain embodiments, the dsRNA(s) comprise a lyophilized powder or granules.

[0808] In certain embodiments, the compositions for application/delivery of one or more dsRNAs described herein comprises dsRNA(s) as a solution or suspension. In certain embodiments, applications of RNAs may be applied in a way wherein the particulate, the RNA, or both, are further applied with an osmolyte, and whereby the target gene is silenced. In certain embodiments, the composition comprising the dsRNA(s) described herein associated with any adjuvants that meets the standards of the Chemical Producers and Distributors Association (CPDA) adjuvant certification program.

[0809] In certain embodiments a composition for application/delivery of one or more dsRNA(s) described herein may comprise dsRNA(s) mixed with an adhesion agent such as a non-naturally occurring adhesion agent. A non-naturally occurring adhesion agent can be, for example, a polymer, copolymer, or synthetic wax. For example, any of the coated seeds, seedlings, or plants described herein can contain such an agriculturally acceptable carrier in the seed coating.

[0810] In certain embodiments, a composition for application/delivery of one or more dsRNA(s) described herein comprises dsRNA(s) mixed with other biological pesticides, plant growth regulators, and/robiocontrol or biostimulants. In certain embodiments, the biostimulant compound is a peptide, a polypeptide, another RNA molecule, a fermentation product, a metabolite, an antibody, a semiochemical, or a micronutrient. In certain embodiments, the dsRNA composition(s) are applied with biostimulants including hormones and biochemical growth agents. These include but are not limited to abscisic acid, auxins, cytokinins, ACC Deaminase, gibberellins, brassinosteroids, salicylic acid, jasmonates, plant peptide hormones, polyamines, nitric oxide, strigolactones, karrikins, and triacontanol, which are used to both positively and negatively regulate the growth of plants. In some embodiments, the biologically active compounds are pheromones. In certain embodiments, biostimulants comprises microbial properties such as rhizobium (PGPRs) properties. In certain embodiments, biostimulants comprises acids (such as humic substances, humin, fulvic acids, B vitamins, amino acids, fatty acids/lipids), extracts (such as carboxyls, botanicals, allelochemicals, betaines, polyamines, polyphenols, chitosan and other biopolymers), phosphites, phosphate solubilizers, nitrogenous compounds, inorganic salts, protein hydrolysates, and beneficial elements. In certain embodiments the biocontrol product is a peptide, a polypeptide, another RNA molecule, a fermentation product, a metabolite, an antibody, a semiochemical, or a micronutrient.

dsRNA Compositions Comprising Growth Regulators.

[0811] In certain embodiments, a composition for application/delivery of one or more dsRNA(s) described herein may include one or more growth regulators. Illustrative growth regulators include, but are not limited to Abscisic acid, amidochlor, ancymidol, 6-benzylaminopurine, brassinolide, butralin, chlormequat (chlormequat chloride), choline chloride, cyclanilide, daminozide, dikegulac, dimethipin, 2,6-dimethylpuridine, ethephon, flumetralin, flurprimidol, fluthiacet, forchlorfenuron, gibberellic acid, inabenfide, indole-3-acetic acid, maleic hydrazide, mefluidide, mepiquat (mepiquat chloride), naphthaleneacetic acid, N-6-benzyladenine, paclobutrazol, prohexadione phosphorotrithioate, 2,3,5-tri-iodobenzoic acid, trinexapac-ethyl and uniconazole. Additional non-limiting examples of growth regulators include brassinosteroids, cytokinines (e.g., kinetin and zeatin), auxins (e.g., indolylacetic acid and indolylacetyl aspartate), flavonoids and isoflavanoids (e.g., formononetin and diosmetin), phytoalexins (e.g., glyceollin), and phytoalexin-inducing oligosaccharides (e.g., pectin, chitin, chitosan, polygalacuronic acid, and oligogalacturonic acid), and gibellerins.

dsRNA Compositions Comprising Fertilizers, Plant Micronutrients, and/or Plant Macronutrients.

[0812] In certain embodiments, a composition for application/delivery of one or more dsRNA(s) described herein comprises dsRNA(s) mixed with fertilizers, plant micronutrients and plant macro-nutrients, which can include, but are not limited to, nitrogen, phosphorous, potassium, calcium, sulfur, magnesium, boron, chloride, manganese, iron, zinc, copper, molybdenum, and selenium (or a salt thereof). Additional examples of fertilizers include one or more amino acids, salts, carbohydrates, vitamins, glucose, NaCl, yeast extract, NH4H2PO4, (NH4)2S04, glycerol, valine, L-leucine, lactic acid, propionic acid, succinic acid, malic acid, citric acid, KH tartrate, xylose, lyxose, and lecithin. Further examples of fertilizers which may be useful in embodiments include ammonium nitrate, ammonium sulfate, anhydrous ammonia, calcium nitrate/urea, oxamide, potassium nitrate, urea, urea sulfate, ammoniated superphosphate, diammonium phosphate, nitric phosphate, potassium carbonate, potassium metaphosphate, calcium chloride, magnesium ammonium phosphate, magnesium sulfate, ammonium sulfate, potassium sulfate, and others disclosed herein. Some examples of nutrients can be selected from the group consisting of a nitrogen fertilizer including, but not limited to urea, ammonium nitrate, ammonium sulfate, non-pressure nitrogen solutions, aqua ammonia, anhydrous ammonia, ammonium thiosulfate, sulfur-coated urea, urea-formaldehydes, IBDU, polymer-coated urea, calcium nitrate, ureaform, and methylene urea, phosphorous fertilizers such as diammonium phosphate, monoammonium phosphate, ammonium polyphosphate, concentrated superphosphate and triple superphosphate, and potassium fertilizers such as potassium chloride, potassium sulfate, potassium-magnesium sulfate, potassium nitrate. Such compositions can exist as free salts or ions within the seed coat composition. Alternatively, nutrients/fertilizers can be complexed or chelated to provide sustained release over time.

dsRNA Compositions Comprising Agrochemicals.

[0813] In certain embodiments, compositions comprising the dsRNAs described herein comprises a mixture of one or more dsRNA molecules described herein and at least one of a variety of agricultural chemicals or agrochemicals. Examples of agrochemical substances include, but are not limited to, chemical pesticides (such as herbicides, algicides, fungicides, bactericides, viricides, insecticides, acaricides, miticides, nematicides and molluscicides), herbicide safeners, plant growth regulators (such as hormones and chemical growth agents), fertilizers and nutrients, gametocides, defoliants, desiccants, mixtures thereof and the like, and any combination thereof.

[0814] Non-limiting examples of agrochemical herbicides, insecticides, miticides, fungicides, nematicide, bactericide, pesticidal agents and/or biopesticidal (e.g., microbial, plant-incorporated-protectant (PIP), and/or biochemical) agents include, but are not limited to Spiromesifen, Spirodiclofen, Spirotetramat, Pyridaben, Tebufenpyrad, Tolfenpyrad, Fenpyroximate, Flufenerim, Pyrimidifen, Fenazaquin, Rotenone, Cyenopyrafen, Hydramethylnon, Acequinocyl, Fluacrypyrim, Aluminium phosphide, Calcium phosphide, Phosphine, Zinc phosphide, Cyanide, Diafenthiuron, Azocyclotin, Cyhexatin, Fenbutatin oxide, Propargite, Tetradifon, Bensultap, Thiocyclam, Thiosultap-sodium, Flonicamid, Etoxazole, Clofentezine, Diflovidazin, Hexythiazox, Chlorfluazuron, Bistrifluron, Diflubenzuron, Flucycloxuron, Flufenoxuron, Hexaflumuron, Fufenuron, Novaluron, Noviflumuron, Teflubenzuron, Triflumuron, Buprofezin, Cyromazine, Hydroprene, Kinoprene, Methoprene, Fenoxycarb, Pyriproxyfen, Pymetrozine, Pyrifluquinazon, Chlorfenapyr, Tralopyril, methyl bromide and/or other alkyl halides, Chloropicrin, Sulfuryl fluoride, Benclothiaz, Chinomethionat, Cryolite, Methylneodecanamide, Benzoximate, Cymiazole, Fluensulfone, Azadirachtin, Bifenazate, Amidoflumet, Dicofol, Plifenate, Cyflumetofen, Pyridalyl, Beauveria bassiana GHA, Sulfoxaflor, Spinetoram, Spinosad, Spinosad, Emamectin benzoate, Fepimectin, Milbemectin, Abamectin, Methoxyfenozide, Chromafenozide, Halofenozide, Tebufenozide, Amitraz, Chlorantraniliprole, Cyantraniliprole, Flubendiamide, alpha-endosulfan, Chlordane, Endosulfan, Fipronil, Acetoprole, Ethiprole, Pyrafluprole, Pyriprole, Indoxacarb, Metaflumizone, Acrinathrin, Allethrin, Allethrin-cis-trans, Allethrin-trans, beta-Cyfluthrin, beta-Cypermethrin, Bifenthrin, Bioallethrin, Bioallethrin S-cyclopentenyl, Bioresmethrin, Cycloprothrin, Cyfluthrin, Cyhalothrin, Cypermethrin, Cyphenothrin [(1R)-trans-isomers], Dimefluthrin, Empenthrin [(EZ)-(1R)-isomers], Esfenvalerate, Etofenprox, Fenpropathrin, Fenvalerate, Flucythrinate, Flumethrin, Gamma-cyhalothrin, lambda-Cyhalothrin, Meperfluthrin, Metofluthrin, Permethrin, Phenothrin [(1R)-trans-isomer], Prallethrin, Profluthrin, Protrifenbute, Resmethrin, Silafluofen, tau-Fluvalinate, Tefluthrin, Tetramethrin, Tetramethrin [(1R)-isomers], Tetramethylfluthrin, theta-Cypermethrin, Tralomethrin, Transfluthrin, zeta-Cypermethrin, alpha-Cypermethrin, Deltamethrin, DDT, Methoxychlor, Thiodicarb, Alanycarb, Aldicarb, Bendiocarb, Benfuracarb, Butoxycarboxim, Carbaryl, Carbofuran, Carbosulfan, Ethiofencarb, Fenobucarb, Formetanate, Furathiocarb, Isoprocarb, Methiocarb, Methomyl, Metolcarb, Oxamyl, Pirimicarb, Propoxur, Thiofanox, Triazamate, Trimethacarb, XMC, Xylylcarb, Chlorpyrifos, Malathion, Acephate, Azamethiphos, Azinphos-ethyl, Azinphos-methyl, Cadusafos, Chlorethoxyfos, Chlorfenvinphos, Chlormephos, Chlorpyrifos-methyl, Coumaphos, Cyanophos, Demeton-S-methyl, Diazinon, Dichlorvos/DDVP, Dicrotophos, Dimethoate, Dimethylvinphos, Disulfoton, EPN, Ethion, Ethoprophos, Famphur, Fenamiphos, Fenitrothion, Fenthion, Fonofos, Fosthiazate, Imicyafos, Isofenphos-methyl, Mecarbam, Methamidophos, Methidathion, Mevinphos, Monocrotophos, Naled, Omethoate, Oxydemeton-methyl, Parathion, Parathion-methyl, Phenthoate, Phorate, Phosalone, Phosmet, Phosphamidon, Phoxim, Pirimiphos-ethyl, Profenofos, Propaphos, Propetamphos, Prothiofos, Pyraclofos, Pyridaphenthion, Quinalphos, Sulfotep, Tebupirimfos, Temephos, Terbufos, Tetrachlorvinphos, Thiometon, Triazophos, Trichlorfon, Vamidothion Imidacloprid, Thiamethoxam, Acetamiprid, Clothianidin, Dinotefuran, Nitenpyram, Nithiozine, Nicotine, Thiacloprid, cyantraniliprole, carbamates, organophosphates, cyclodiene organochlorines, phenylpyrazoles (fiproles), pyrethroids, pyrethins, DDT Methoxychlor, Neonicotinoids, Nicotine, Sulfoximines, Butenolides, Mesoionics, Spinosyns, Avermectins, Milbernycins, Juvenile hormone analogues, Fenoxycarb, Pyriproxyfen, Alkyl halides, Chloropicrin, Fluorides, Borates, Tarter emetic, Methyl isothiocyanate generators, Pyridine azomethine derivatives, Pyropenes, Clofentezine, Diflovidazin, Hexythiazox, Etoxazole, Diafenthiuron, Organotin miticides, Propargite, Tetradifon, Pyrroles, Dinitrophenols, Sulfuramid, Nereistoxin analogues, Benzoylureas, Buprofezin, Cyromazine, Diacylhydrazines, Amitraz, Hydramethylnon, Acequinocyl, Fluacrypyrim, Bifenazate, METI acaricides and insecticides, Rotenone, Oxadiazines, Semicarbazones, Tetronic and Tetramic acid derivatives, Phosphides, Cyanides, Beta-ketonitrile derivatives, Carboxanilides, Diamides, Flonicamid, Meta-diamides Isoxazolines, Granuloviruses (GVs), Nucleopolyhedrovimses (NPVs), GS-omega/kappa HXTX-Hvla peptide, Azadirachtin, Benzoximate, Bromopropylate, Chinomethionat, Dicofol, Lime sulfur, Mancozeb, Pyridalyl, Sulfur, Benzimidazoles, Dicarboximides, Pyridines, Pyrimidines, Triazoles, Acylalanines, Pyridine carboxamides, Anilino-pyrimidines, Quinone outside Inhibitors (Qol-fungicides), Phenylpyrroles, Quinolines, Hydroxyanilides, Toluamides, Cyanoacetamide-oximes, Dinitrophenyl crotonates, Phosphonates, Carboxylic Acid Amides (CAA-fungicides), M1 inorganic, M2 inorganic, M3 dithiocarbamates, M4 phthalimides, paraffinic oil, petroleum-based horticultural oils, palmitic oil, steric oil, linoleic oil, oleic oils, canola oil, soybean oil, oregano oil, tagetes oil, balsam fir oil, thyme oil, black pepper oil, mint oil, cedarwood oil, fish oil, jojoba oil, lavadin oil, castor oil, eucalyptus oil, ocimum oil, patchouli oil, citrus oil, artemisia oil, camphor oil, wintergreen oil, methyl eugenol oil, thymol oil, geranium oil, sesame oil, linseed oil, cottonseed oil, lemongrass oil, bergamot oil, mustard oil, orange oil, citronella oil, tea tree oil, neem oil, garlic oil, Bacillus sphaericus, Bacillus thuringiensis (e.g., Bacillus thuringiensis var. aizawai, Bacillus thuringiensis var. israelensis, Bacillus thuringiensis var. kurstaki, Bacillus thuringiensis var. sphaericus, Bacillus thuringiensis var. tenebrionensis) and the insecticidal proteins they produce (e.g., Cry1Ab, Cry 1 Ac, CrylFa, Cry 1 A.105, Cry2Ab, Vip3A, mCry3A, Cry3Ab, Cry3Bb, Cry34Abl/Cr35Abl, and as further exemplified in Crickmore, N., Baum, J., Bravo, A., Lereclus, D., Narva, K., Sampson, K., Schnepf, E., Sun, M. and Zeigler, D. R. “Bacillus thuringiensis toxin nomenclature” (2018)), Paenibacillus popilliae, Serratia entomophila, nuclear polyhedrosis viruses, granulosis viruses, non-occluded baculoviruses, Beauveria spp, Metarhizium, Entomophaga, Zoopthora, Paecilomyces fumosoroseus, Normuraea, Lecanicillium lecanii, Nosema, Thelohania, Vairimorpha, Steinernema spp, Heterorhabditis spp or any combination thereof, which may further comprise an active ingredient selected from the group consisting of azinphos-methyl, acephate, isoxathion, isofenphos, ethion, etrimfos, oxydemeton-methyl, oxydeprofos, quinalphos, chlorpyrifos, chlorpyrifos-methyl, chlorfenvin phos, cyanophos, dioxabenzofos, dichlorvos, disulfoton, dimethylvinphos, dimethoate, sulprofos, diazinon, thiometon, tetrachlorvinphos, temephos, tebupirimfos, terbufos, naled, vamidothion, pyraclofos, pyridafen thion, pirimiphos-methyl, fenitrothion, fenthion, phenthoate, flupyrazophos, prothiofos, propaphos, profenofos, phoxime, phosalone, phosmet, formothion, phorate, malathion, mecarbam, mesulfenfos, methamidophos, methidathion, parathion, methyl parathion, monocrotophos, trichlorphon, EPN, isazophos, isamidofos, cadusafos, diamidaphos, dichlofenthion, thionazin, fenamiphos, fosthiazate, fosthietan, phosphocarb, DSP, ethoprophos, alanycarb, aldicarb, isoprocarb, ethiofen carb, carbaryl, carbosulfan, xylylcarb, thiodicarb, pirimicarb, fenobucarb, furathiocarb, propoxur, ben diocarb, benfuracarb, methomyl, metolcarb, XMC, carbofuran, aldoxycarb, oxamyl, acrin athrin, allethrin, esfenvalerate, empenthrin, cycloprothrin, cyhalothrin, gamma-cyhalothrin, lambda-cyhalothrin, cyfluthrin, beta-cyfluthrin, cypermethrin, alpha-cypermethrin, zeta-cyper-methrin, silafluofen, tetramethrin, tefluthrin, deltamethrin, tralomethrin, bifenthrin, phenothrin, fenvalerate, fenpropathrin, furamethrin, prallethrin, flucythrinate, fluvalinate, flubrocythrinate, permethrin, resmethrin, ethofenprox, cartap, thiocyclam, ben sultap, acetamiprid, imidacloprid, clothianidin, dinotefuran, thiacloprid, thiamethoxam, nitenpyram, chlorfluazuron, difluben zuron, teflubenzuron, triflumuron, novaluron, noviflumuron, bistrifluoron, fluazuron, flucycloxuron, flufenoxuron, hexaflumuron, lufenuron, chromafen ozide, tebufenozide, halofen ozide, methoxyfen ozide, diofen olan, cyromazin e, pyriproxyfen, buprofezin, methop-rene, hydroprene, kinoprene, triazamate, endosulfan, chlorfenson, chlorobenzilate, dicofol, bromopropylate, acetoprole, flpronil, ethiprole, pyrethrin, rotenone, nicotinesulphate, spinosad, finpronil, spirotetramat abamectin, acequinocyl, amidoflumet, amitraz, etoxazole, chinomethionat, clofentezine, fenbutatin oxide, dienochlor, cyhexatin, spirodiclofen, spiromesifen, tetradifon, tebufenpyrad, binapacryl, bifenazate, pyridaben, pyrimidifen, fenazaquin, fenothiocarb, fenpyroximate, fluacrypyrim, flu-azinam, flufenzin, hexythiazox, propargite, polynactin complex, milbemectin, lufenuron, mecarbam, methiocarb, mevinphos, halfenprox, azadirachtin, diafenthiuron, indoxacarb, emamectin benzoate, potassium oleate, sodium oleate, chlorfenapyr, tolfenpyrad, pymetrozine, fenoxycarb, hydramethylnon, hydroxy propyl starch, pyridalyl, flufenerim, flubendiamide, flonicamid, metaflumizole, lepimectin, TPIC, albendazole, oxibendazole, oxfendazole, trichlamide, fensulfothion, fenbendazole, levamisole hydrochloride, morantel tartrate, dazomet, metam-sodium, tri-adimefon, hexaconazole, propiconazole, ipconazole, prochloraz, triflumizole, tebuconazole, epoxiconazole, difenoconazole, flusilazole, triadimenol, cyproconazole, metconazole, fluquinconazole, bitertanol, tetraconazole, triticonazole, flutriafol, penconazole, diniconazole, fenbuconazole, bromuconazole, imibenconazole, simeconazole, myclobutanil, hymexazole, imazalil, furametpyr, thifluzamide, etridiazole, oxpoconazole, oxpoconazole fumarate, pefurazoate, prothioconazole, pyrifenox, fenarimol, nuari-mol, bupirimate, mepanipyrim, cyprodinil, pyrimethanil, metalaxyl, mefenoxam, oxadixyl, benalaxyl, thiophanate, thiophanate-methyl, benomyl, carbendazim, fuberidazole, thiabendazole, manzeb, propineb, zineb, metiram, maneb, ziram, thiuram, chlorothalonil, ethaboxam, oxycarboxin, carboxin, flutolanil, silthiofam, mepronil, dimethomorph, fenpropidin, fenpropimorph, spiroxamine, tridemorph, dodemorph, flumorph, azoxystrobin, kresoxim-methyl, metominostrobin, orysastrobin, fluoxastrobin, trifloxystrobin, dimoxystrobin, pyraclostrobin, picoxystrobin, iprodione, procymidone, vinclozolin, chlozolinate, flusulfamide, dazomet, methyl isothiocyanate, chloropicrin, methasulfocarb, hydroxyisoxazole, potassium hydroxyisoxazole, echlomezol, D-D, carbarn, basic copper chloride, basic copper sulfate, copper nonylphenolsulfonate, oxine copper, DBEDC, anhydrous copper sulfate, copper sulfate pentahydrate, cupric hydroxide, inorganic sulfur, wettable sulfur, lime sulfur, zinc sulfate, fentin, sodium hydrogen carbonate, potassium hydrogen carbonate, potassium bicarbonate, sodium hypochlorite, silver, edifenphos, tolclofos-methyl, fosetyl, iprobenfos, dinocap, pyrazophos, carpropamid, fthalide, tricyclazole, pyroquilon, diclocymet, fenoxanil, kasugamycin, validamycin, polyoxins, blasticiden S, oxytetracycline, mildiomycin, streptomycin, rape seed oil, machine oil, benthiavalicarbisopropyl, iprovalicarb, propamocarb, diethofencarb, fluoroimide, fludioxanil, fenpiclonil, quinoxyfen, oxolinic acid, chlorothalonil, captan, folpet, probenazole, acibenzolar-S-methyl, tia-dinil, cyflufenamid, fenhexamid, diflumetorim, metrafenone, picobenzamide, proquinazid, famoxadone, cyazofamid, fenamidone, zoxamide, boscalid, cymoxanil, dithianon, fluazinam, dichlofluanide, triforine, isoprothiolane, ferimzone, diclomezine, tecloftalam, pencycuron, chinomethionat, iminoctadine acetate, iminoctadine albesilate, ambam, polycarbamate, thiadiazine, chloroneb, nickel dimethyldithiocarbamate, guazatine, dodecylguanidine acetate, quintozene, tolylfluanid, anilazine, nitrothalisopropyl, fenitropan, dimethirimol, benthiazole, flumetover, mandipropamide, and penthiopyrad, or any combinations thereof.

dsRNA Compositions Comprising Additional Fungicides.

[0815] In certain embodiments, compositions comprising the dsRNAs described herein may include an additional fungicide—a fungicide other than the dsRNA(s) described herein. Illustrated fungicides include, but are not limited to: AIGA compounds, 2-(thiocyanatomethylthio)-benzothiazole, 2-phenylphenol, 8-hydroxyquinoline sulfate, Ampelomyces quisqualis, azaconazole, azoxystrobin, Bacillus subtilis, benalaxyl, benomyl, benthiavalicarb-isopropyl, benzylaminobenzene-sulfonate (BABS) salt, bicarbonates, biphenyl, bismerthiazol, bitertanol, blasticidin-S, borax, Bordeaux mixture, boscalid, bromuconazole, bupirimate, calcium polysulfide, captafol, captan, carbendazim, carboxin, carpropamid, carvone, chloroneb, chlorothalonil, chlozolinate, Coniothyrium minitans, copper hydroxide, copper octanoate, copper oxychloride, copper sulfate, copper sulfate (tribasic), cuprous oxide, cyazofamid, cyflufenamid, cymoxanil, cyproconazole, cyprodinil, dazomet, debacarb, diammonium ethylenebis-(dithiocarbamate), dichlofluanid, dichlorophen, diclocymet, diclomezine, dichloran, diethofencarb, difenoconazole, difenzoquation, diflumetorim, dimethomorph, dimoxystrobin, diniconazole, diniconazole-M, dinobuton, dinocap, diphenylamine, dithianon, dodemorph, dodemorph acetate, dodine, dodine free base, edifenphos, epoxiconazole, ethaboxam, ethoxyquin, etridiazole, famoxadone, fenamidone, fenarimol, fenbuconazole, fenfuram, fenhexamid, fenoxanil, fenpiclonil, fenpropidin, fenpropimorph, fentin, fentin acetate, fentin hydroxide, ferbam, ferimzone, fluazinam, fludioxonil, flumorph, fluopicolide, fluoroimide, fluoxastrobin, fluquinconazole, flusilazole, flusulfamide, flutolanil, flutriafol, folpet, formaldehyde, fosetyl, fosetyl-aluminium, fuberidazole, furalaxyl, furametpyr, guazatine, guazatine acetates, GY-81, hexachlorobenzene, hexaconazole, hymexazol, imazalil, imazalil sulfate, imibenconazole, iminoctadine, iminoctadine triacetate, iminoctadine tris(albesilate), ipconazole, iprobenfos, iprodione, iprovalicarb, isoprothiolane, kasugamycin, kasugamycin hydrochloride hydrate, kresoxim-methyl, mancopper, mancozeb, maneb, mepanipyrim, mepronil, mercuric chloride, mercuric oxide, mercurous chloride, metalaxyl, metalaxyl-M, metam, metam-ammonium, metam-potassium, metam-sodium, metconazole, methasulfocarb, methyl iodide, methyl isothiocyanate, metiram, metominostrobin, metrafenone, mildiomycin, myclobutanil, nabam, nitrothal-isopropyl, nuarimol, octhilinone, ofurace, oleic acid (fatty acids), orysastrobin, oxadixyl, oxine-copper, oxpoconazole fumarate, oxycarboxin, pefurazoate, penconazole, pencycuron, pentachlorophenol, pentachlorophenyl laurate, penthiopyrad, phenylmercury acetate, phosphonic acid, phthalide, picoxystrobin, polyoxin B, polyoxins, polyoxorim, potassium bicarbonate, potassium hydroxyquinoline sulfate, probenazole, prochloraz, procymidone, propamocarb, propamocarb hydrochloride, propiconazole, propineb, proquinazid, prothioconazole, pyraclostrobin, pyrazophos, pyributicarb, pyrifenox, pyrimethanil, pyroquilon, quinoclamine, quinoxyfen, quintozene, Reynoutria sachalinensis extract, silthiofam, simeconazole, sodium 2-phenylphenoxide, sodium bicarbonate, sodium pentachlorophenoxide, spiroxamine, sulfur, SYP-Z071, tar oils, tebuconazole, tecnazene, tetraconazole, thiabendazole, thifluzamide, thiophanate-methyl, thiram, tiadinil, tolclofos-methyl, tolylfluanid, triadimefon, triadimenol, triazoxide, tricyclazole, tridemorph, trifloxystrobin, triflumizole, triforine, triticonazole, validamycin, vinclozolin, zineb, ziram, zoxamide, Candida oleophila, Fusarium oxysporum, Gliocladium spp., Phlebiopsis gigantean, Streptomyces griseoviridis, Trichoderma spp., (RS)—N-(3,5-dichlorophenyl)-2-(methoxymethyl)-succinimide, 1,2-dichloropropane, 1,3-dichloro-1,1,3,3-tetrafluoroacetone hydrate, 1-chloro-2,4-dinitronaphthalene, 1-chloro-2-nitropropane, 2-(2-heptadecyl-2-imidazolin-1-yl)ethanol, 2,3-dihydro-5-phenyl-1,4-dithi-ine 1,1,4,4-tetraoxide, 2-methoxyethylmercury acetate, 2-methoxyethylmercury chloride, 2-methoxyethylmercury silicate, 3-(4-chlorophenyl)-5-methylrhodanine, 4-(2-nitroprop-1-enyl)phenyl thiocyanateme: ampropylfos, anilazine, azithiram, barium polysulfide, Bayer 32394, benodanil, benquinox, bentaluron, benzamacril; benzamacril-isobutyl, benzamorf, binapacryl, bis(methylmercury) sulfate, bis(tributyltin) oxide, buthiobate, cadmium calcium copper zinc chromate sulfate, carbamorph, CECA, chlobenthiazone, chloraniformethan, chlorfenazole, chlorquinox, climbazole, copper bis(3-phenylsalicylate), copper zinc chromate, cufraneb, cupric hydrazinium sulfate, cuprobam, cyclafuramid, cypendazole, cyprofuram, decafentin, dichlone, dichlozoline, diclobutrazol, dimethirimol, dinocton, dinosulfon, dinoterbon, dipyrithione, ditalimfos, dodicin, drazoxolon, EBP, ESBP, etaconazole, etem, ethirim, fenaminosulf, fenapanil, fenitropan, fluotrimazole, furcarbanil, furconazole, furconazole-cis, furmecyclox, furophanate, glyodine, griseofulvin, halacrinate, Hercules 3944, hexylthiofos, ICIA0858, isopamphos, isovaledione, mebenil, mecarbinzid, mefenoxam, metazoxolon, methfuroxam, methylmercury dicyandiamide, metsulfovax, milneb, mucochloric anhydride, myclozolin, N-3,5-dichlorophenyl-succinimide, N-3-nitrophenylitaconimide, natamycin, N-ethylmercurio-4-toluene sulfonanilide, nickel bis(dimethyldithiocarbamate), OCH, phenylmercury dimethyldithiocarbamate, phenylmercury nitrate, phosdiphen, prothiocarb; prothiocarb hydrochloride, pyracarbolid, pyridinitril, pyroxychlor, pyroxyfur, quinacetol; quinacetol sulfate, quinazamid, quinconazole, rabenzazole, salicylanilide, SSF-109, sultropen, tecoram, thiadifluor, thicyofen, thiochlorfenphim, thiophanate, thioquinox, tioxymid, triamiphos, triarimol, triazbutil, trichlamide, urbacid, XRD-563, and zarilamid, and any combinations thereof.

[0816] In certain embodiments, composition are provided that comprise a mixture of one or more dsRNA molecule(s) described herein and at least one of the fungicides belonging to a certain FRAC groups developed by The Fungicide Resistance Action Committee (FRAC). In certain embodiments, the added fungicide acts on Nucleic acid metabolism and belong to FRAC groups 4, 8, 31 and 32. In certain embodiments, the added fungicide acts on the cytoskeletal and motor proteins of the cell of pathogen and belong to FRAC groups 1, 10, 20, 22, 43, 47, 50. In certain embodiments, the added fungicide acts on respiration and belong to FRAC groups 7, 11, 21, 29, 30, 38, 39, 45. In certain embodiments, the added fungicide acts on Amino acid and protein synthesis and belong to FRAC groups 9, 23, 24, 25, 41, In certain embodiments, the added fungicide acts on Signal transduction and belong to FRAC groups 13, 12 and 2. In certain embodiments, the added fungicide acts on Lipid synthesis and belong to FRAC groups 6, 14, 28, 46, 48 and 49. In certain embodiments, the added fungicide acts on sterol biosynthesis in membranes and belong to FRAC groups 3, 5, 17, 18. In certain embodiments, the added fungicide acts on cell wall biosynthesis and belong to FRAC groups 19 and 40. In certain embodiments, the added fungicide acts on melanin synthesis in cell wall and belong to FRAC groups 16.1, 16.2, 16.3. In certain embodiments, the added fungicide acts as a host plant defence induction and belong to FRAC groups P01 to P07. In certain embodiments, the added fungicide acts by an unknown mechanism and belong to FRAC groups 27, 34, 35, 36, 37, U06, U12, U13, U14, U16, U17 and U18. In certain embodiments, the added fungicide is not classified. In certain embodiments, the added fungicide is a chemical with multi-site activity and belong to FRAC groups M01 to M12. In certain embodiments, the added fungicide is a biological and belong to FRAC groups BM01, BM02 and other groups added to this category.

dsRNA Compositions Comprising Insecticides.

[0817] In certain embodiments, compositions comprising the dsRNAs described herein may include an additional insectide—a insecticide other than the dsRNA(s) described herein. Illustrative insecticides include but are not limited to AIGA compounds, antibiotic insecticides such as allosamidin and thuringiensin; macrocyclic lactone insecticides such as spinosad, spinetoram, and other spinosyns including the 21-butenyl spinosyns and their derivatives; avermectin insecticides such as abamectin, doramectin, emamectin, eprinomectin, ivermectin and selamectin; milbemycin insecticides such as lepimectin, milbemectin, milbemycin oxime and moxidectin; arsenical insecticides such as calcium arsenate, copper acetoarsenite, copper arsenate, lead arsenate, potassium arsenite and sodium arsenite; biological insecticides such as Bacillus popilliae, B. sphaericius, B. thurinigiensis subsp. aizqwai, B. thuringiensis subsp. kurstaki, B. thuriugiensis subsp. tenebrionis, Beauveria bassiana, Cydia pomonella granulosis virus, Douglas fir tussock moth nuclear polyhedrosis virus NPV, gypsy moth NPV, Helicoverpa zea NPV, Indian meal moth granulosis virus, Metarhizium anisopliae, Nosema locustae, Paecilomyces fumosoroseus, P. lilacinus, Photorhabdus luminescens, Spodoptera exigua NPV, trypsin modulating oostatic factor, Xenorhabdus nematophilus, and X. bovienii; plant incorporated protectant insecticides such as Cry1Ab, Cry1Ac, Cry1F, Cry1A.105, Cry2Ab2, Cry3A, mir Cry3A, Cry3Bb1, Cry34, Cry35, and VIP3A; botanical insecticides such as anabasine, azadirachtin, d-limonene, nicotine, pyrethrins, cinerins, cinerin I, cinerin II, jasmolin I, jasmolin II, pyrethrin I, pyrethrin II, quassia, rotenone, ryania and sabadilla; carbamate insecticides such as bendiocarb and carbaryl; benzofuranyl methylcarbamate insecticides such as benfuracarb, carbofuran, carbosulfan, decarbofuran and furathiocarb; dimethylcarbamate insecticides dimitan, dimetilan, hyquincarb and pirimicarb; oxime carbamate insecticides such as alanycarb, aldicarb, aldoxycarb, butocarboxim, butoxycarboxim, methomyl, nitrilacarb, oxamyl, tazimcarb, thiocarboxime, thiodicarb and thiofanox; phenyl methylcarbamate insecticides such as allyxycarb, aminocarb, bufencarb, butacarb, carbanolate, cloethocarb, dicresyl, dioxacarb, EMPC, ethiofencarb, fenethacarb, fenobucarb, isoprocarb, methiocarb, metolcarb, mexacarbate, promacyl, promecarb, propoxur, trimethacarb, XMC and xylylcarb; dinitrophenol insecticides such as dinex, dinoprop, dinosam and DNOC; fluorine insecticides such as barium hexafluorosilicate, cryolite, sodium fluoride, sodium hexafluorosilicate and sulfluramid; formamidine insecticides such as amitraz, chlordimeform, formetanate and formparanate; fumigant insecticides such as acrylonitrile, carbon di sulfide, carbon tetrachloride, chloroform, chloropicrin, para-dichlorobenzene, 1,2-dichloropropane, ethyl formate, ethylene dibromide, ethylene dichloride, ethylene oxide, hydrogen cyanide, iodomethane, methyl bromide, methylchloroform, methylene chloride, naphthalene, phosphine, sulfuryl fluoride and tetrachloroethane; inorganic insecticides such as borax, calcium polysulfide, copper oleate, mercurous chloride, potassium thiocyanate and sodium thiocyanate; chitin synthesis inhibitors such as bistrifluoron, buprofezin, chlorfluazuron, cyromazine, diflubenzuron, flucycloxuron, flufenoxuron, hexaflumuron, lufenuron, novaluron, noviflumuron, penfluoron, teflubenzuron and triflumuron; juvenile hormone mimics such as epofenonane, fenoxycarb, hydroprene, kinoprene, methoprene, pyriproxyfen and triprene; juvenile hormones such as juvenile hormone I, juvenile hormone II and juvenile hormone III; moulting hormone agonists such as chromafenozide, halofenozide, methoxyfenozide and tebufenozide; moulting hormones such as alpha-ecdysone and ecdysterone; moulting inhibitors such as diofenolan; precocenes such as precocene I, precocene II and precocene III; unclassified insect growth regulators such as dicyclanil; nereistoxin analogue insecticides such as bensultap, cartap, thiocyclam and thiosultap; nicotinoid insecticides such as flonicamid; nitroguanidine insecticides such as clothianidin, dinotefuran, imidacloprid and thiamethoxam; nitromethylene insecticides such as nitenpyram and nithiazine; pyridylmethylamine insecticides such as acetamiprid, imidacloprid, nitenpyram and thiacloprid; organochlorine insecticides such as bromo-DDT, camphechlor, DDT, pp′-DDT, ethyl-DDD, HCH, gamma-HCH, lindane, methoxychlor, pentachlorophenol and TDE; cyclodiene insecticides such as aldrin, bromocyclen, chlorbicyclen, chlordane, chlordecone, dieldrin, dilor, endosulfan, endrin, HEOD, heptachlor, HHDN, isobenzan, isodrin, kelevan and mirex; organophosphate insecticides such as bromfenvinfos, chlorfenvinphos, crotoxyphos, dichlorvos, dicrotophos, dimethylvinphos, fospirate, heptenophos, methocrotophos, mevinphos, monocrotophos, naled, naftalofos, phosphamidon, propaphos, TEPP and tetrachlorvinphos; organothiophosphate insecticides such as dioxabenzofos, fosmethilan and phenthoate; aliphatic organothiophosphate insecticides such as acethion, amiton, cadusafos, chlorethoxyfos, chlormephos, demephion, demephion-O, demephion-S, demeton, demeton-O, demeton-S, demeton-methyl, demeton-O-methyl, demeton-S-methyl, demeton-S-methyl sulphon, disulfoton, ethion, ethoprophos, PSP, isothioate, malathion, methacrifos, oxydemeton-methyl, oxydeprofos, oxydisulfoton, phorate, sulfotep, terbufos and thiometon; aliphatic amide organothiophosphate insecticides such as amidithion, cyanthoate, dimethoate, ethoate-methyl, formothion, mecarbam, omethoate, prothoate, sophamide and vamidothion; oxime organothiophosphate insecticides such as chlorphoxim, phoxim and phoxim-methyl; heterocyclic organothiophosphate insecticides such as azamethiphos, coumaphos, coumithoate, dioxathion, endothion, menazon, morphothion, phosalone, pyraclofos, pyridaphenthion and quinothion; benzothiopyran organothiophosphate insecticides such as dithicrofos and thicrofos; benzotriazine organothiophosphate insecticides such as azinphos-ethyl and azinphos-methyl; isoindole organothiophosphate insecticides such as dialifos and phosmet; isoxazole organothiophosphate insecticides such as isoxathion and zolaprofos; pyrazolopyrimidine organothiophosphate insecticides such as chlorprazophos and pyrazophos; pyridine organothiophosphate insecticides such as chlorpyrifos and chlorpyrifos-methyl; pyrimidine organothiophosphate insecticides such as butathiofos, diazinon, etrimfos, lirimfos, pirimiphos-ethyl, pirimiphos-methyl, primidophos, pyrimitate and tebupirimfos; quinoxaline organothiophosphate insecticides such as quinalphos and quinalphos-methyl; thiadiazole organothiophosphate insecticides such as athidathion, lythidathion, methidathion and prothidathion; triazole organothiophosphate insecticides such as isazofos and triazophos; phenyl organothiophosphate insecticides such as azothoate, bromophos, bromophos-ethyl, carbophenothion, chlorthiophos, cyanophos, cythioate, dicapthon, dichlofenthion, etaphos, famphur, fenchlorphos, fenitrothion, fensulfothion, fenthion, fenthion-ethyl, heterophos, jodfenphos, mesulfenfos, parathion, parathion-methyl, phenkapton, phosnichlor, profenofos, prothiofos, sulprofos, temnephos, trichlormetaphos-3 and trifenofos; phosphonate insecticides such as butonate and trichlorfon; phosphonothioate insecticides such as mecarphon; phenyl ethylphosphonothioate insecticides such as fonofos and trichloronat; phenyl phenylphosphonothioate insecticides such as cyanofenphos, EPN and leptophos; phosphoramidate insecticides such as crufomate, fenamiphos, fosthietan, mephosfolan, phosfolan and pirimetaphos; phosphoramidothioate insecticides such as acephate, isocarbophos, isofenphos, methamidophos and propetamphos; phosphorodiamide insecticides such as dimefox, mazidox, mipafox and schradan; oxadiazine insecticides such as indoxacarb; phthalimide insecticides such as dialifos, phosmet and tetramethrin; pyrazole insecticides such as acetoprole, ethiprole, fipronil, pyrafluprole, pyriprole, tebufenpyrad, tolfenpyrad and vaniliprole; pyrethroid ester insecticides such as acrinathrin, allethrin, bioallethrin, barthrin, bifenthrin, bioethanomethrin, cyclethrin, cycloprothrin, cyfluthrin, beta-cyfluthrin, cyhalothrin, gamma-cyhalothrin, lambda-cyhalothrin, cypermethrin, alpha-cypermethrin, beta-cypermethrin, theta-cypermethrin, zeta-cypermethrin, cyphenothrin, deltamethrin, dimefluthrin, dimethrin, empenthrin, fenfluthrin, fenpirithrin, fenpropathrin, fenvalerate, esfenvalerate, flucythrinate, fluvalinate, tau-fluvalinate, furethrin, imiprothrin, metofluthrin, permethrin, biopermethrin, transpermethrin, phenothrin, prallethrin, profluthrin, pyresmethrin, resmethrin, bioresmethrin, cismethrin, tefluthrin, terallethrin, tetramethrin, tralomethrin and transfluthrin; pyrethroid ether insecticides such as etofenprox, flufenprox, halfenprox, protrifenbute and silafluofen; pyrimidinamine insecticides such as flufenerim and pyrimidifen; pyrrole insecticides such as chlorfenapyr; tetronic acid insecticides such as spirodiclofen, spiromesifen and spirotetramat; thiourea insecticides such as diafenthiuron; urea insecticides such as flucofuron and sulcofuron; and unclassified insecticides such as AKD-3088, closantel, crotamiton, cyflumetofen, E2Y45, EXD, fenazaflor, fenazaquin, fenoxacrim, fenpyroximate, FKI-1033, flubendiamide, HGW86, hydramethylnon, isoprothiolane, malonoben, metaflumizone, metoxadiazone, nifluridide, NNI-9850, NNI-0101, pymetrozine, pyridaben, pyridalyl, Qcide, rafoxanide, rynaxypyr, SYJ-159, triarathene and triazamate and any combinations thereof.

dsRNA Compositions Comprising a Herbicide.

[0818] In certain embodiments, compositions comprising the dsRNAs described herein may include one or more herbicide(s) (e.g., a herbicide other than a dsRNA described herein. Illustrative herbicides include but are not limited to: amide herbicides such as allidochlor, beflubutamid, benzadox, benzipram, bromobutide, cafenstrole, CDEA, chlorthiamid, cyprazole, dimethenamid, dimethenamid-P, diphenamid, epronaz, etnipromid, fentrazamide, flupoxam, fomesafen, halosafen, isocarbamid, isoxaben, napropamide, naptalam, pethoxamid, propyzamide, quinonamid and tebutam; anilide herbicides such as chloranocryl, cisanilide, clomeprop, cypromid, diflufenican, etobenzanid, fenasulam, flufenacet, flufenican, mefenacet, mefluidide, metamifop, monalide, naproanilide, pentanochlor, picolinafen and propanil; arylalanine herbicides such as benzoylprop, flamprop and flamprop-M; chloroacetanilide herbicides such as acetochlor, alachlor, butachlor, butenachlor, delachlor, diethatyl, dimethachlor, metazachlor, metolachlor, S-metolachlor, pretilachlor, propachlor, propisochlor, prynachlor, terbuchior, thenylchlor and xylachlor; sulfonanilide herbicides such as benzofluor, perfluidone, pyrimisulfan and profluazol; sulfonamide herbicides such as asulam, carbasulam, fenasulam and oryzalin; antibiotic herbicides such as bilanafos; benzoic acid herbicides such as chloramben, dicamba, 2,3,6-TBA and tricamba; pyrimidinyloxybenzoic acid herbicides such as bispyribac and pyriminobac; pyrimidinylthiobenzoic acid herbicides such as pyrithiobac; phthalic acid herbicides such as chlorthal; picolinic acid herbicides such as aminopyralid, clopyralid and picloram; quinolinecarboxylic acid herbicides such as quinclorac and quinmerac; arsenical herbicides such as cacodylic acid, CMA, DSMA, hexaflurate, MAA, MAMA, MSMA, potassium arsenite and sodium arsenite; benzoylcyclohexanedione herbicides such as mesotrione, sulcotrione, tefuryltrione and tembotrione; benzofuranyl alkylsulfonate herbicides such as benfuresate and ethofumesate; carbamate herbicides such as asulam, carboxazole chlorprocarb, dichlormate, fenasulam, karbutilate and terbucarb; carbanilate herbicides such as barban, BCPC, carbasulam, carbetamide, CEPC, chlorbufam, chlorpropham, CPPC, desmedipham, phenisopham, phenmedipham, phenmedipham-ethyl, propham and swep; cyclohexene oxime herbicides such as alloxydim, butroxydim, clethodim, cloproxydim, cycloxydim, profoxydim, sethoxydim, tepraloxydim and tralkoxydim; cyclopropylisoxazole herbicides such as isoxachlortole and isoxaflutole; dicarboximide herbicides such as benzfendizone, cinidon-ethyl, flumezin, flumiclorac, flumioxazin and flumipropyn; dinitroaniline herbicides such as benfluralin, butralin, dinitramine, ethalfluralin, fluchloralin, isopropalin, methalpropalin, nitralin, oryzalin, pendimethalin, prodiamine, profluralin and trifluralin; dinitrophenol herbicides such as dinofenate, dinoprop, dinosam, dinoseb, dinoterb, DNOC, etinofen and medinoterb; diphenyl ether herbicides such as ethoxyfen; nitrophenyl ether herbicides such as acifluorfen, aclonifen, bifenox, chlomethoxyfen, chlornitrofen, etnipromid, fluorodifen, fluoroglycofen, fluoronitrofen, fomesafen, furyloxyfen, halosafen, lactofen, nitrofen, nitrofluorfen and oxyfluorfen; dithiocarbamate herbicides such as dazomet and metam; halogenated aliphatic herbicides such as alorac, chloropon, dalapon, flupropanate, hexachloroacetone, iodomethane, methyl bromide, monochloroacetic acid, SMA and TCA; imidazolinone herbicides such as imazamethabenz, imazamox, imazapic, imazapyr, imazaquin and imazethapyr; inorganic herbicides such as ammonium sulfamate, borax, calcium chlorate, copper sulfate, ferrous sulfate, potassium azide, potassium cyanate, sodium azide, sodium chlorate and sulfuric acid; nitrile herbicides such as bromobonil, bromoxynil, chloroxynil, dichlobenil, iodobonil, ioxynil and pyraclonil; organophosphorus herbicides such as amiprofos-methyl, anilofos, bensulide, bilanafos, butamifos, 2,4-DEP, DMPA, EBEP, fosamine, glufosinate, glyphosate and piperophos; phenoxy herbicides such as bromofenoxim, clomeprop, 2,4-DEB, 2,4-DEP, difenopenten, disul, erbon, etnipromid, fenteracol and trifopsime; phenoxyacetic herbicides such as 4-CPA, 2,4-D, 3,4-DA, MCPA, MCPA-thioethyl and 2,4,5-T; phenoxybutyric herbicides such as 4-CPB, 2,4-DB, 3,4-DB, MCPB and 2,4,5-TB; phenoxypropionic herbicides such as cloprop, 4-CPP, dichlorprop, dichlorprop-P, 3,4-DP, fenoprop, mecoprop and mecoprop-P; aryloxyphenoxypropionic herbicides such as chlorazifop, clodinafop, clofop, cyhalofop, diclofop, fenoxaprop, fenoxaprop-P, fenthiaprop, fluazifop, fluazifop-P, haloxyfop, haloxyfop-P, isoxapyrifop, metamifop, propaquizafop, quizalofop, quizalofop-P and trifop; phenylenediamine herbicides such as dinitramine and prodiamine; pyrazolyl herbicides such as benzofenap, pyrazolynate, pyrasulfotole, pyrazoxyfen, pyroxasulfone and topramezone; pyrazolyiplpiethyl herbicides such as fluazolate and pyraflufen; pyridamine herbicides such as credazine, pyridafol and pyridate; pyridazitiotte herbicides such as brompyrazon, chloridazon, dimidazon, flufenpyr, metflurazon, norflurazon, oxapyrazon and pydanon; pyridine herbicides such as aminopyralid, cliodinate, clopyralid, dithiopyr, fluoroxypyr, haloxydine, picloram, picolinafen, pyriclor, thiazopyr and triclopyr; pyrimidinediamine herbicides such as iprymidam and tioclorim; quaternary ammonium herbicides such as cyperquat, diethamquat, difenzoquat, diquat, morfamquat and paraquat; thiocarbamate herbicides such as butylate, cycloate, di-allate, EPTC, esprocarb, ethiolate, isopolinate, methiobencarb, molinate, orbencarb, pebulate, prosulfocarb, pyributicarb, sulfallate, thiobencarb, tiocarbazil, tri-allate and vernolate; thiocarbonate herbicides such as dimexano, EXD and proxan; thiourea herbicides such as methiuron; triazine herbicides such as dipropetryn, triaziflam and trihydroxytriazine; chlorotriazine herbicides such as atrazine, chlorazine, cyanazine, cyprazine, eglinazine, ipazine, mesoprazine, procyazine, proglinazine, propazine, sebuthylazine, simazine, terbuthylazine and trietazine; methoxytriazine herbicides such as atraton, methometon, prometon, secbumeton, simeton and terbumeton; methylthiotriazine herbicides such as ametryn, aziprotryne, cyanatryn, desmetryn, dimethametryn, methoprotryne, prometryn, simetryn and terbutryn; triazinone herbicides such as ametridione, amibuzin, hexazinone, isomethiozin, metamitron and metribuzin; triazole herbicides such as amitrole, cafenstrole, epronaz and flupoxam; triazolone herbicides such as amicarbazone, bencarbazone, carfentrazone, flucarbazone, propoxycarbazone, sulfentrazone and thiencarbazone-methyl; triazolopyrimidine herbicides such as cloransulam, diclosulam, florasulam, flumetsulam, metosulam, penoxsulam and pyroxsulam; uracil herbicides such as butafenacil, bromacil, flupropacil, isocil, lenacil and terbacil; 3-phenyluracils; urea herbicides such as benzthiazuron, cumyluron, cycluron, dichloralurea, diflufenzopyr, isonoruron, isouron, methabenzthiazuron, monisouron and noruron; phenylurea herbicides such as anisuron, buturon, chlorbromuron, chloreturon, chlorotoluron, chloroxuron, daimuron, difenoxuron, dimefuron, diuron, fenuron, fluometuron, fluothiuron, isoproturon, linuron, methiuron, methyldymron, metobenzuron, metobromuron, metoxuron, monolinuron, monuron, neburon, parafluoron, phenobenzuron, siduron, tetrafluoron and thidiazuron; pyrimidinylsulfonylurea herbicides such as amidosulfuron, azimsulfuron, bensulfuron, chlorimuron, cyclosulfamuron, ethoxysulfuron, flazasulfuron, flucetosulfuron, flupyrsulfuron, foramsulfuron, halosulfuron, imazosulfuron, mesosulfuron, nicosulfuron, orthosulfamuron, oxasulfuron, primisulfuron, pyrazosulfuron, rimsulfuron, sulfometuron, sulfosulfuron and trifloxysulfuron; triazinylsulfonylurea herbicides such as chlorsulfuron, cinosulfuron, ethametsulfuron, iodosulfuron, metsulfuron, prosulfuron, thifensulfuron, triasulfuron, tribenuron, triflusulfuron and tritosulfuron; thiadiazolylurea herbicides such as buthiuron, ethidimuron, tebuthiuron, thiazafluoron and thidiazuron; and unclassified herbicides such as acrolein, allyl alcohol, azafenidin, benazolin, bentazone, benzobicyclon, buthidazole, calcium cyanamide, cambendichlor, chlorfenac, chlorfenprop, chlorflurazole, chlorflurenol, cinmethylin, clomazone, CPMF, cresol, ortho-dichlorobenzene, dimepiperate, endothal, fluoromidine, fluridone, fluorochloridone, flurtamone, fluthiacet, indanofan, methazole, methyl isothiocyanate, nipyraclofen, OCH, oxadiargyl, oxadiazon, oxaziclomefone, pentachlorophenol, pentoxazone, phenylmercury acetate, pinoxaden, prosulfalin, pyribenzoxim, pyriftalid, quinoclamine, rhodethanil, sulglycapin, thidiazimin, tridiphane, trimeturon, tripropindan and tritac.

dsRNA Compositions Comprising Other Agricultural Compounds

[0819] In certain embodiments, compositions comprising the dsRNAs described herein comprise a rodenticide. Illustrative rodenticides include but are not limited to 2-isovalerylindan-1,3-dione, 4-(quinoxalin-2-ylamino) benzenesulfonamide, alpha-chlorohydrin, aluminum phosphide, antu, arsenous oxide, barium carbonate, bisthiosemi, brodifacoum, bromadiolone, bromethalin, calcium cyanide, chloralose, chlorophacinone, cholecalciferol, coumachlor, coumafuryl, coumatetralyl, crimidine, difenacoum, difethialone, diphacinone, ergocalciferol, flocoumafen, fluoroacetamide, flupropadine, flupropadine hydrochloride, hydrogen cyanide, iodomethane, lindane, magnesium phosphide, methyl bromide, norbormide, phosacetim, phosphine, phosphorus, pindone, potassium arsenite, pynnuron, scilliroside, sodium arsenite, sodium cyanide, sodium fluoroacetate, strychnine, thallium sulfate, warfarin and zinc phosphide.

[0820] In certain embodiments, compositions comprising the dsRNAs described herein may include other antibacterial agents. Illustrative antibacterial agents include, but are not limited to Streptomycin, oxytetracycline, oxolinic acid, or gentamicin. Other examples of antibacterial compounds include those based on dichlorophene and benzylalcohol hemi formal (Proxel® from ICI or Acticide® RS from Thor Chemie and Kathon® MK 25 from Rohm & Haas) and isothiazolinone derivatives such as alkylisothiazolinones and benzisothiazolinones (Acticide® MBS from Thor Chemie). In certain embodiments, compositions comprising the dsRNAs described herein mixed with other group of chemicals including for example, hormones, nutrients, crop beneficials and crop protection products are provided.

[0821] In certain embodiments, application of RNAs may be made as seed treatment, foliar application, stem application, drench or drip application (chemigation) to the seed, the plant or the fruit, to the soil or to inert substrate (e.g., inorganic substrates like sand, rockwool, glasswool; expanded minerals like perlite, vermiculite, zeolite or expanded clay), Pumice, Pyroclastic materials or stuff, synthetic organic substrates (e.g., polyurethane) organic substrates (e.g. peat, composts, tree waste products like coir, wood fiber or chips, tree bark) or to a liquid substrate (e.g. floating hydroponic systems, Nutrient Film Technique, Aeroponics) wherein the plant is growing or wherein it is desired to be grown.

[0822] It will be recognized that in various embodiments where compositions comprising one or more dsRNA(s) described herein and additional agent as described above are provided, methods that involve administration of the dsRNA(s) and the additional agents separately are also contemplated.

[0823] In certain embodiments, application of RNAs may be made as seed treatment, foliar application, stem application, drench or drip application (chemigation) to the seed, the plant or the fruit, to the soil or to inert substrate (e.g., inorganic substrates like sand, rockwool, glasswool; expanded minerals like perlite, vermiculite, zeolite or expanded clay), Pumice, Pyroclastic materials or stuff, synthetic organic substrates (e.g., polyurethane) organic substrates (e.g. peat, composts, tree waste products like coir, wood fibre or chips, tree bark) or to a liquid substrate (e.g. floating hydroponic systems, Nutrient Film Technique, Aeroponics) wherein the plant is growing or wherein it is desired to be grown.

[0824] In certain embodiments the compositions facilitate methods for controlling a phytopathogen (e.g., a phtopathogenic fungus) characterized in that an effective and non-phytotoxic amount of dsRNA molecules described herein, or of compositions described herein are applied to the soil where plants grow or are capable of growing, to the leaves and/or the fruit of plants or to the seeds of such plants.

[0825] In certain embodiments the dsRNAs can be formulated for and applied by the plants by means of various methods of treatment such as: 1) Spraying onto the aerial parts of the said plants a liquid comprising one of the said compositions; 2) Dusting, incorporating granules or powders into the soil, spraying, around the said plants and in the case of trees injection or daubing; 3) Coating or film-coating the seeds of the plants with the aid of a plant-protection mixture comprising one of the said compositions; and the like.

[0826] In certain embodiments the methods provided herein can be a curing, preventing or eradicating method. In certain embodiments, the dose of active dsRNA compound usually applied in the methods of treatment described herein is generally and advantageously:
[0827] 1) For foliar treatments: from 0.0001 to 10,000 g/ha, preferably from 0,0001 to 1000 g/ha, more preferably from 0.001 to 300 g/ha;
[0828] 2) In case of drench or drip application, the dose can even be reduced, especially while using inert substrates like rockwool or perlite;
[0829] 3) For seed treatment: from 0.0001 to 200 g per 100 kilogram of seed, preferably from 0.001 to 150 g per 100 kilogram of seed;
[0830] 4) For soil treatment: from 0.0001 to 10,000 g/ha, preferably from 0.001 to 5,000 g/ha.

[0831] Optimal application methods and dosages can readily be determined by one of skill in the art.

[0832] The former is illustrative and non-limiting. Using the teaching provided herein, numerous compositions/formulations of the dsRNAs suitable for application to a plant or to a plant part (e.g., a seed, leaf, or fruit) will be available to one of skill in the art.

### Recombinant Constructs

[0833] In certain embodiments, a recombinant nucleic acid construct, such as a DNA, comprising and/or encoding a nucleic acid molecule disclosed anywhere herein for silencing a target gene, including long dsRNA, hpRNA, miRNA, and siRNA is provided. Certain aspects provide for recombinant nucleic acid constructs comprising and/or encoding an RNAi precursor of a nucleic acid molecule disclosed anywhere herein for silencing a target gene, including long dsRNA, hpRNA, miRNA, tasiRNA, and siRNA.

[0834] In certain embodiments, a recombinant nucleic acid construct, such as a DNA vector, encoding and capable of expressing a target gene silencing sequence for silencing a target gene described anywhere herein is provided. In certain aspects, a recombinant DNA construct comprises a gene silencing sequence comprising about any of 17, 18, 19, 20, 21, 22, 23, 24, 25, 30, 40, 50, 60, 100, 120, 200, 240, 300, 400, 500, 600, 650, 750, 1000 to about any of 21, 22, 23, 24, 25, 30, 40, 50, 100, 200, 300, 400, 500, 600, 650, 750, 1000, or 2000 contiguous nucleotides of a target gene or target gene transcript disclosed anywhere herein. In certain aspects, a recombinant DNA construct comprises or encodes a gene silencing sequence complementary to about 17 to 21 contiguous nucleotides, or complementary to about 17 to 50 contiguous nucleotides, or complementary to about 50 to 100 contiguous nucleotides, or complementary to about 50 to 250 contiguous nucleotides, or complementary to about 250-600 contiguous nucleotides, or complementary to about 500-1,000 contiguous nucleotides of a target gene sequence or transcript thereof. In certain aspects, the gene silencing sequence comprises about contiguous nucleotides of the protein coding region of the target gene sequence. In certain aspects, the gene silencing sequence comprises about 21 to 500 or 100 to 1000 or about 200 to 1000 contiguous nucleotides of the 5′ UTR region or the 3′ UTR region of the target gene sequence. In certain aspects, the gene silencing sequence comprises at least 0.1%, 0.4%, 0.6%, 1%, 2%, 3%, 5%, 7%, 10%, 20%, 30%, 40%, 50%, 60%, 70%, 80%, 90%, 95%, 98%, 99%, or 100% contiguously of the length of target gene sequence protein coding region, the target gene sequence 5′ UTR region, target gene sequence 3′ UTR region and/or any combination thereof.

[0835] In certain embodiments, the recombinant DNA construct comprises a sequence coding a gene silencing sequence (e.g., dsRNA as described herein) operably linked to one or more promoters for the expression of a dsRNA molecule that silences the target gene when transcribed into a host plant. Thus, in certain aspects, the construct comprises an expression vector.

[0836] Representative promoters for use in expressing a dsRNA molecule include, but are not limited to promoters that are operable in plants. Such promoters include constitutive promoters, inducible promoters, and tissue-specific promoters.

[0837] Constitutive promoters facilitate expression of the gene in all tissues regardless of the surrounding environment and development stage of the organism. Such promoters can turn on the gene in every living cell of the organism, all the time, throughout the organism's lifetime. These promoters can often be utilized across species. Examples of constitutive promoters that are commonly used for plants include Cauliflower mosaic virus (CaMV) 355, opine promoters, plant ubiquitin (Ubi), rice actin 1 (Act-1) and maize alcohol dehydrogenase 1 (Adh-1). CaMV 35S is the most commonly used constitutive promoter for high levels of gene expression in dicot plants. Maize Ubi and rice Act-1 are currently the most commonly used constitutive promoters for monocots.

[0838] Tissue-specific or development-stage-specific promoters facilitate expression of a gene in specific tissue(s) or at certain stages of development while leaving the rest of the organism unmodified. In the case of plants, such promoters might specifically influence expression of genes in the roots, fruits, or seeds, or during the vegetative, flowering, or seed-setting stage. If the developer wants a gene of interest to be expressed in more than one tissue type for example the root, anthers and egg sac, then multiple tissue-specific promoters may have to be included in the gene construct.

[0839] Effective gene expression in specific plant parts or development stages often has been observed when promoters from closely related species are used. There are many promoters in this category because they have different tissue and developmental specificities. An example of a tissue-specific promoter is the phosphoenolpyruvate (PEP) carboxylase promoter which induces gene expression only in cells that are actively involved in photosynthesis. In plant genetic engineering, this promoter is used for traits desired in the shoot, leaves and sometimes the stem. Expression of genes controlled by this promoter is reduced later in the growing season as the plant approaches senescence.

[0840] Inducible promoters are activated by exogenous (i.e., external) factors. Exogenous factors may be abiotic such as heat, water, salinity, chemical, or biotic like pathogen or insect attack. Promoters that react to abiotic factors are the most commonly used in plant genetic engineering because these can easily be manipulated. Such promoters respond to chemical compounds such as antibiotics, herbicides or changes in temperature or light. Inducible promoters can also be tissue or development stage specific.

[0841] Promoters can be derived directly from naturally occurring genes, or may be synthesized to combine regulatory sequences from different promoter regions. The promoters interact with other regulatory sequences (enhancers or silencers) and regulatory proteins (transcription factors) to influence the amount of gene transcription/expression.

### Transgenic Plants and Host Induced Gene Silencing

[0842] In certain embodiments, transgenic plants are provided that provide host induced gene silencing (HIGS). Host-induced gene silencing (HIGS) which is a method where a plant controls a pathogen by RNA interference (RNAi) and exhibits, for example, an enhanced resistance when carrying suitable gene silencing constructs.

[0843] In various embodiments for the production of transgenic phytopathogen resistant plants in the present invention, a DNA capable of expressing one or more dsRNA as described herein is provided selected and introduced into the plant or a part thereof.

[0844] The DNA capable of expressing the dsRNA(s) may be present within an expression cassette. As used herein, an “expression cassette” is a nucleic acid molecule that is composed of one or more genes or genetic sequences and the sequences controlling their expression. An expression cassette may contain a promoter regulatory sequence, also designated promoter, operably linked to an open reading frame or another genetic sequence, and a 3′ untranslated region that may contain a polyadenylation site. The promoter directs the machinery of the cell to make RNA and/or protein. As used herein, “operably linked” means that expression of the linked DNA is under control of the operably linked promoter. In certain embodiments, an expression cassette may be part of a vector used for cloning and introducing the DNA into a cell.

[0845] A DNA capable of expressing a dsRNA described herein may comprise one or more DNA sequence capable of expressing one or more dsRNAs against one target gene or target gene ortholog described herein or more than one target gene or target gene ortholog described herein such as 2, 3, 4, 5, etc. Consequently, in certain embodiments, the transgenic plants contemplated herein may comprise in a cell one DNA molecule expressing one or more dsRNA(s) against one target gene or target gene ortholog described herein, or against more than one target gene or target gene ortholog described herein. Alternatively, in certain embodiments, the transgenic plant may comprise in a cell more than one DNA expressing more than one dsRNA described herein, one dsRNA molecules, each DNA or each dsRNA molecule being against one or more than one specific target gene(s) or target gene analogs described herein. Also, combinations of DNA encoding dsRNA against one gene and DNA encoding dsRNA against more than one gene are contemplated herein.

[0846] In certain embodiments, the DNA introduced into the transgenic plants is capable of expressing an inhibitory nucleic acid molecule results, upon transcription in the plant cell in an mRNA molecule that may function as an antisense or other inhibitory RNA and inhibit mRNA(s) involved expression of the gene product(s) of the target gene(s) described herein.

[0847] In certain embodiments, the DNA introduced into the transgenic plants is results upon expression (transcription) in the plant cell in an mRNA molecule or in mRNA molecules that may form a dsRNA which may activate the RNAi machinery. Within this embodiment, the DNA encodes an RNA molecule in sense direction and an RNA molecule in antisense direction. The sense sequence and the antisense sequence may be present on one DNA strand. This may result in an mRNA molecule which comprises the sense sequence and antisense sequence on the same mRNA molecule. Due to the reverse substantial complementarity of the sense sequence and antisense sequence, a hairpin dsRNA will form. Alternatively, if e.g., the sense and antisense sequences being present on the same DNA strand are under the control of different promoters or of one bidirectional promoter, different mRNA molecules are transcribed, one harboring the sense sequence and the other harboring the antisense sequence. Different mRNA molecules, one harboring the sense sequence and the other harboring the antisense sequence, may also form if the sense sequence and the antisense sequence are present on different strands of the DNA. Due to the reverse substantial complementarity of the sense and antisense sequences, the mRNAs form a dsRNA. The dsRNA may be recognized as foreign by the plant cell and may activate the RNAi machinery. The dsRNA transcribed from the DNA may be an siRNA, miRNA or other inhibitory RNA molecules or may be processed to an siRNA, miRNA or other inhibitory RNA molecules. After infection of the plant with a phytopathogen (e.g., a phytopathogenic fungus), an exchange of the RNA generated in the plant may occur between the plant and the phytopathogen. The RNA incorporated in the phytopathogen may lead to a sequence-specific gene silencing of the target gene(s) or target gene ortholog(s). It is known that the siRNA effect can be continued in plants if the RNA dependent RNA polymerase synthesizes new siRNAs from the degraded mRNA fragments. These secondary or transitive RNAis can enhance the silencing.

[0848] For introducing the DNA molecule into a plant or a part thereof, numerous methods are known in the art. One illustrative, but non-limiting method is transformation of the DNA molecule, expression cassette or vector harboring the DNA molecule by the use of bacteria of the Agrobacterium genus, e.g., by infection of the cells or tissues of plants with A. tumefaciens (see, e.g., Knopf (1979) Subcell. Biochem. 6: 143-173; Shaw et al. (1983) Gene, 23(3); 315-330) or A. rhizogenes (see, e.g., Bevan & Chilton (1982) Annu. Rev. Genet. 16: 357-384; Tepfer & Casse-Delbart (1987) Microbiol. Sci. 4(1); 24-28). For example, the transformation of plant cells or tissues with Agrobacterium tumefaciens can be carried out according to the protocol described by Hiei et al. (1994) Plant J. 6(2); 271-282).

[0849] Other illustrative, but non limiting methods for introducing DNA molecules into the plant genome include engineered nucleases such as zinc finger nucleases (ZFNs), Transcription Activator Like Effector Nucleases (TALENs), engineered homing endonucleases, and RNA or DNA guided endonucleases, such as CRISPR gene editing technology to carry out site specific integration (see, e.g., Wada et al. (2020) BMC Plant Biol 20: 234). Additionally, or alternatively, RNA targeting systems can use used, such as CRISPR/Cas systems have RNA targeting nucleases.

[0850] Another method is the biolistic transformation method, wherein cells or tissues are bombarded with particles onto which the vectors of the invention are adsorbed (see, e.g., Bruce et al. (1989) Proc. Natl. Acad. Sci. USA 86(24); 9692-9696; Klein et al. (1992) Biotechnology, 10(3); 286-291; U.S. Pat. No. 4,945,050, and the like). A further method is the widely used protoplast transformation where the plant cells are separated by pectinases and subsequently, the cell wall is degraded to generate protoplasts. For transformation, polyethylene glycol is added or electroporation is applied. Other methods can involve bringing the plant cells or tissues into contact with polyethylene glycol (PEG) and the vectors (see, e.g., Chang & Cohen (1979) Mol. Gen. Genet. 168(1); 111-115; Mercenier & Chassy (1988) Biochimie 70(4); 503-517; and the like). Electroporation is another method, that consists in subjecting the cells or tissues to be transformed and the vectors described herein to an electric field (see, e.g., Andreason & Evans (1988) Biotechniques 6(7); 650-660; Shigekawa & Dower (1989) Aust. J. Biotechnol. 3(1); 56-62; and the like). Another method consists in directly injecting the vectors into the cells or the tissues by microinjection (see, e.g., Gordon & Ruddle (1985) Gene 33(2); 121-136). Those skilled in the art will choose the appropriate method according to the nature of the plant to be transformed and the phytopathogen which the plant is to be rendered resistant.

[0851] In various embodiments, the selection step for identifying a transformed plant or a part thereof comprising the DNA molecule, or a processed construct can be carried out via a selectable gene present in the vector, as referred to above. In certain embodiments, the selectable gene may comprise an operably linked promoter regulatory sequence and terminator regulatory sequence that are functional in plant cells.

[0852] Among the selectable markers that can be used reference is made to genes for resistance against antibiotics, such as the hygromycin phosphotransferase gene, the neomycin phosphotransferase II gene inducing resistance against kanamycin, or the aminoglycoside 3-adenyltransferase gene, genes for tolerance to herbicides such as the bar gene (White et al. (1990) Nucl. Acids Res., 18: 1062) for tolerance to bialaphos, the EPSPS gene (U.S. Pat. No. 5,188,642) for tolerance to glyphosate or else the HPPD gene (PCT Pub No: WO 96/038567) for tolerance to isoxazoles, genes encoding identifiable enzymes, such as the GUS enzyme, GFP protein or genes encoding pigments or enzymes regulating pigment production in the transformed cells. Such selectable marker genes are described in PCT Publication Nos: WO 91/002071, WO 95/006128, WO 96/038567, and WO 97/004103.

[0853] Cells or tissues of plants, e.g., root cells grown in culture, can be transformed with the desired gene (encoding a dsRNA described herein) and grown into mature plants. When transformation is effective, the transgene will be incorporated into the pollen and eggs and passed on to the next generation.

[0854] In one embodiment, the DNA molecule or expression cassette is stably integrated into the genome of the transgenic plant, preferably into a chromosome of the plant. Integration can, however, also occur into an extrachromosomal element. By stable integration into the genome of a plant, the DNA sequences can be passed to subsequent generations of the transgenic plant. Alternatively, the DNA molecule or expression cassette is present within the plant cell on the vector used to introduce the DNA molecule and is not stably integrated into the genome of the plant. Therefore, the DNA sequences may not be passed to subsequent generations of the plant.

[0855] In certain embodiments, all plants and all parts of a plant can be treated according to the methods described herein. By plants is meant all plants and plant populations such as desirable and undesirable wild plants, cultivars and plant varieties (whether or not protectable by plant variety or plant breeder's rights). Cultivars and plant varieties can be plants obtained by conventional propagation and breeding methods which can be assisted or supplemented by one or more biotechnological methods such as by use of double haploids, protoplast fusion, random or directed mutagenesis, molecular or genetic markers or by bioengineering or genetic engineering methods.

[0856] The term “part of a plant” refers to any parts or organs of a plant such shoot vegetative organs/structures, e.g., leaves, stems or tubers; roots, flowers or floral organs/structures, e.g. bracts, sepals, petals, stamens, carpels, anthers or ovules; seed, including embryo, endosperm or seed coat; fruit or the mature ovary; plant tissue, e.g. vascular tissue or ground tissue; or cells, e.g. guard cells, egg cells or trichomes; or progeny of the same. The term “cell” refers to a cell or cell accumulation within the plant as well as to an isolated cell or isolated cell accumulation. A cell may have a cell wall or may be a protoplast. In particular, in certain embodiments a seed which comprises the DNA, expression cassette or vector is provided. Preferably, the seeds of a transgenic plant retain the DNA, expression cassette or vector described herein, so that the new plants generated from a seed continues to comprise the DNA, expression cassette or vector

[0857] Plants that can be protected by the method according to the invention comprise all plants, preferably plants of economic interest. In certain embodiments, the plant is a plant selected from the group consisting of barley (Hordeum vulgare), sorghum (Sorghum bicolor), rye (Secale cereale), Triticale, sugar cane (Saccharum officinarium), maize (Zea mays), foxtail millet (Setaria italic), rice (Oryza sativa), Oryza minuta, Oryza australiensis, Oryza alta, wheat (Triticum aestivum), Triticum durum, Hordeum bulbosum, purple false brome (Brachypodium distachyon), sea barley (Hordeum marinum), goat grass (Aegilops tauschii), apple (Malus domestica), sugar beet (Beta vulgaris), sunflower (Helianthus annuus), strawberry (Fragaria ananassa), Australian carrot (Daucus glochidiatus), American wild carrot (Daucus pusillus), Daucus muricatus, carrot (Daucus carota), eucalyptus (Eucalyptus grandis), Erythranthe guttata, Genlisea aurea, woodland tobacco (Nicotiana sylvestris), tobacco (Nicotiana tabacum), Nicotiana tomentosiformis, tomato (Solanum lycopersicum), potato (Solanum tuberosum), pepper (Capsicum annum), coffee (Coffea canephora), grape vine (Vitis vinifera and other Vitis species), cucumber (Cucumis sativus), mulberry (Morus notabilis), thale cress (Arabidopsis thaliana), Arabidopsis lyrata, sand rock-cress (Arabidopsis arenosa), rose (Rosa sp.), hops (Humulus lupulus), cannabis and hemp (Cannabis sativa), Crucihimalaya himalaica, Crucihimalaya wallichii, wavy bittercress (Cardamine flexuosa), peppergrass (Lepidium virginicum), sheperd's-purse (Capsella bursa-pastoris), Olmarabidopsis pumila, hairy rockcress (Arabis hirsuta), rape (Brassica napus), broccoli (Brassica oleracea), Brassica rapa, Brassica juncacea, black mustard (Brassica nigra), radish (Raphanus sativus), Eruca vesicaria sativa, orange (Citrus sinensis), Jatropha curcas, cotton (Gossipium sp.), soybean (Glycine max), and black cottonwood (Populus trichocarpa). Particularly preferred, the plant is selected from the group consisting of barley (Hordeum vulgare), sorghum (Sorghum bicolor), rye (Secale cereale), Triticale, sugar cane (Saccharum officinarium), maize (Zea mays), rice (Oryza sativa), wheat (Triticum aestivum), Triticum durum, Avena sativa, Hordeum bulbosum, sugar beet (Beta vulgaris), sunflower (Helianthus annuus), carrot (Daucus carota), tobacco (Nicotiana tabacum), tomato (Solanum lycopersicum), potato (Solanum tuberosum), coffee (Coffea canephora), grape vine (Vitis sp. Including vinifera, labrusca, girdiana, arizonica, berlandieri, other vitis species and hybrids), cucumber (Cucumis sativus), thale cress (Arabidopsis thaliana), rape (Brassica napus), broccoli (Brassica oleracea), Brassica rapa, Brassica juncacea, black mustard (Brassica nigra), radish (Raphanus sativus), cotton (Gossipium sp.) and soy-bean (Glycine max). In certain embodiment, the plant is a plant that is a legume, a cereal, millets, berry plant, a fruit tree, an ornamental, a melon or gourd, a cucurbit, or other tree or plant infected by powdery mildew and other plant pathogens.

[0858] In certain embodiments, the plant is a modified plant, in which the plant genome is modified (e.g., by mutation, deletion, gene editing, introduction of a transgene, hybridization, etc.).

[0859] In various embodiments, a method of producing a transgenic plant or a part thereof is provided where the method comprises introducing into at least a cell of the plant the DNA or the expression cassette or the vector encoding a dsRNA described herein and regenerating the transgenic plant from the at least one cell.

[0860] As used herein “regenerating” means a process of growing an entire plant from a single cell, a group of cells, a part of the plant or a tissue of the plant. The skilled person knows methods of introducing DNA into at least a cell of the plant and growing a plant therefrom. “At least a cell” means a single cell, a group of cells, a part of the plant or a tissue of the plant.

[0861] In certain embodiments, a method of conferring phytopathogen (e.g., fungal) resistance to a plant or a part thereof is provided where the method comprises introducing into the plant or the part thereof the DNA or the expression cassette or the vector encoding a dsRNA described herein, and causing expression of the DNA or the expression cassette.

[0862] “As used herein, the term “causing expression” means that under the conditions, under which the plant is kept and/or cultivated, transcription of the DNA having been introduced into the plant is induced. For example, if the promoter is an inducible promoter, the activity of such promoter can be induced by the presence or absence of specific biotic or abiotic factors, according to the choice of the user of the present invention. If the promoter is a constitutive promoter, expression continuously occurs.

### Methods of Use.

[0863] In various embodiments, method of use of the dsRNAs described herein and/or DNAs encoding the dsRNAs are provided. In certain embodiments, the methods include a method for controlling or preventing an infection of a plant by a phytopathogen (e.g., a phytopathogenic fungus). In certain embodiments, the method comprises (a) contacting the plant or part thereof (e.g., a seed) and/or phytopathogen with an isolated double-stranded RNA (dsRNA) described herein or expressing in the plant at least one dsRNA as described herein.

[0864] In certain embodiments, the contacting comprises spraying, dunking, or coating the plant said plant with a composition for controlling or preventing an infection of a plant by a phytopathogen as described herein. In certain embodiments, the contacting is before infection by said phytopathogenic fungus. In certain embodiments, the contacting is during infection by said phytopathogenic fungus. In certain embodiments, the contacting comprises applying one or more dsRNAs described herein to a plant in need thereof. In certain embodiments, the plant comprises a plant of economic interest. In certain embodiments, the plant is a plant selected from the group consisting of barley (Hordeum vulgare), sorghum (Sorghum bicolor), rye (Secale cereale), Triticale, sugar cane (Saccharum officinarium), maize (Zea mays), foxtail millet (Setaria italic), rice (Oryza sativa), Oryza minuta, Oryza australiensis, Oryza alta, wheat (Triticum aestivum), Triticum durum, Hordeum bulbosum, purple false brome (Brachypodium distachyon), sea barley (Hordeum marinum), goat grass (Aegilops tauschii), apple (Malus domestica), strawberry, sugar beet (Beta vulgaris), sunflower (Helianthus annuus), strawberry (Fragaria ananassa), Australian carrot (Daucus glochidiatus), American wild carrot (Daucus pusillus), Daucus muricatus, carrot (Daucus carota), eucalyptus (Eucalyptus grandis), Erythranthe guttata, Genlisea aurea, woodland tobacco (Nicotiana sylvestris), tobacco (Nicotiana tabacum), Nicotiana tomentosiformis, tomato (Solanum lycopersicum), pepper (Capsicum annum), potato (Solanum tuberosum), coffee (Coffea canephora), grape vine (Vitis vinifera and other Vitis species), cucumber (Cucumis sativus), mulberry (Morus notabilis), thale cress (Arabidopsis thaliana), Arabidopsis lyrata, sand rock-cress (Arabidopsis arenosa), rose (Rosa sp.), hops (Humulus lupulus), hemp (Cannabis sativa) and other Cannabis spp., Crucihimalaya himalaica, Crucihimalaya wallichii, wavy bittercress (Cardamine flexuosa), peppergrass (Lepidium virginicum), sheperd's-purse (Capsella bursa-pastoris), Olmarabidopsis pumila, hairy rockcress (Arabis hirsuta), rape (Brassica napus), broccoli (Brassica oleracea), Brassica rapa, Brassica juncacea, black mustard (Brassica nigra), radish (Raphanus sativus), Eruca vesicaria sativa, orange (Citrus sinensis), Jatropha curcas, cotton (Gossipium sp.), soybean (Glycine max), and black cottonwood (Populus trichocarpa). Particularly preferred, the plant is selected from the group consisting of barley (Hordeum vulgare), sorghum (Sorghum bicolor), rye (Secale cereale), Triticale, sugar cane (Saccharum officinarium), maize (Zea mays), rice (Oryza sativa), wheat (Triticum aestivum), Triticum durum, Avena sativa, Hordeum bulbosum, sugar beet (Beta vulgaris), sunflower (Helianthus annuus), carrot (Daucus carota), tobacco (Nicotiana tabacum), tomato (Solanum lycopersicum), potato (Solanum tuberosum), coffee (Coffea canephora), grape vine (Vitis sp. Including, vinifera, labrusca, girdiana, arizonica, berlandieri other Vitis species and hybrids), cucumber (Cucumis sativus), thale cress (Arabidopsis thaliana), rape (Brassica napus), broccoli (Brassica oleracea), Brassica rapa, Brassica juncacea, black mustard (Brassica nigra), radish (Raphanus sativus), cotton (Gossipium sp.) and soy-bean (Glycine max). In certain embodiment, the plant is a plant that is a legume, a cereal, millets, berry plant, a fruit tree, an ornamental, a melon or gourd, a cucurbit, or other tree or plant infected by powdery mildew and other plant pathogens.

[0865] In certain embodiments, the contacting comprises applying one or more dsRNAs described herein to a plant selected from the group consisting of grape, wheat, barley, hops, hemp, cannabis, legumes, e.g., soybean), onion, artichoke, apples, cherry, peaches, pears, carrot, citrus, sunflower, cucumbers, strawberry, tomato, peppers, squashes (including pumpkins), luffas, melons, watermelons, all other cucurbits, coffee rust, oats, ryegrass, a cereal, corn, cotton, sugar cane, rose and other ornamentals. In certain embodiments, the contacting comprises applying one or more dsRNAs described herein to a grapevine.

[0866] In certain embodiments, the said expressing in the plant at least one isolated double-stranded RNA described herein comprises providing a transgenic plant as described herein.

### Screening Systems and Methods.

[0867] In various embodiments, methods of identifying genes in a phytopathogen that when downregulated in the phytopathogen control infection of a host plant by the phytopathogen are provided. In certain embodiments the methods involve i) selecting target gene(s) in the phytopathogen that have ortholog(s) in a reference powdery mildew; ii) designing long dsRNA or siRNA to inhibit the reference powdery mildew orthologues with minimal off-targets in the host plant; iii) inoculating (and/or contacting) said host plant with said reference powdery mildew; contacting said host plant with said dsRNA and/or siRNA; and iv) determining growth and/or reproduction of said reference powdery mildew in said host plant, where reduced growth or reproduction of said reference powdery mildew compared to an untreated plant of the same species indicates that the target genes are phytopathogen genes whose downregulation inhibits infection of said host plant by said phytopathogen. In certain embodiments the method comprises determining growth and/or reproduction of phytopathogen in said host plant, where reduced growth or reproduction of said phytopathogen compared to an untreated plant of the same species indicates that the target genes are phytopathogen genes whose downregulation inhibits infection of said host plant by said phytopathogen.

[0868] In certain embodiments, the method involves: i) selecting target gene(s) in the phytopathogen that have ortholog(s) in Golovinomyces orontii (G. orontii); 2) designing long dsRNA or siRNA to inhibit the G. orontii homologs or orthologues with minimal off-targets in the host plant; 3) inoculating an Arabidopsis spp. plant with the G. orontii; 4) contacting the Arabidopsis spp. plant with the dsRNA and/or siRNA; and 5) determining growth and/or reproduction of the G. orontii, where reduced growth or reproduction of the G. orontii compared to an untreated plant of the same species indicates that the target genes are phytopathogen genes whose downregulation inhibits infection of the host plant by the phytopathogen. One embodiment of such methods is illustrated in Example 1 (see also FIG. 2). In certain embodiments, the ortholog is an ortholog found in a powdery mildew. In certain embodiments, the ortholog is an ortholog found in a powdery mildew selected from the group consisting of powdery mildew genus Golovinomyces including G. orontii and G. cichorachearum (of curcubits), Erysiphe including E. necator (or Uncinula necator) (powdery mildew of grapes), Microsphaera including M. diffusa (powdery mildew of legumes, e.g. soybean), Leveillula including L. taurica (also known as Oidiopsis taurica) (powdery mildew of onion or artichoke), Oidium including O. neolycopersici (powdery mildew of tomato), Podosphaera including P. leucotricha (powdery mildew of apples and pears), P. macularis (powdery mildew of hemp and cannabis), P. xanthii (powdery mildew of cucurbits: cucumbers, squashes (including pumpkins), luffas, melons, and watermelons), and P. pannosa (also known as Sphaerotheca pannosa, powdery mildew of roses).

[0869] In certain embodiments, the ortholog is an ortholog as described above, with respect to target genes and ortholog target genes.

[0870] In certain embodiments, determining growth and/or reproduction comprises counting spore germination and/or differentiation, penetration of cell wall, haustoria formation, hyphal length and area, hyphal transect analysis colony size, conidiophores per colony, spore counts, phytopathogen DNA/RNA quantity, microscopic and visual estimation by eye, thermal imaging, fluorescent dyes/reporters, etc. In certain embodiments the determining growth and/or reproduction comprises counting spore production and/or determining hyphal length. In certain embodiments the determining growth and/or reproduction comprises counting spore production and/or determining hyphal length and/or visual disease symptoms.

### EXAMPLES

[0871] The following examples are offered to illustrate, but not to limit the claimed invention.

### Example 1

### Spray-Induced Gene Silencing Reduces Powdery Mildew Disease

### Summary of Example 1

[0872] Spray-induced gene silencing (SIGS) is an emerging tool being developed to protect crops from disease. It utilizes exogenously applied RNA designed to reduce gene expression of critical genes in plant pests using endogenous RNA interference machinery. The widespread obligate biotrophic pathogen, powdery mildew, infects agriculturally important crops like wheat, barley, cucurbits, and grapevine which can require numerous fungicide treatments to control. For grape powdery mildew, dominant varieties are susceptible to powdery mildew and extensive resistance to fungicides has caused a need for new disease management strategies. As described herein, we developed SIGS methods for powdery mildews and identified novel gene targets that significantly contribute to fungal growth. Golovinomyces orontii, a powdery mildew that infects Arabidopsis thaliana, was found to uptake RNA directly from its environment, independent of the host. SIGS methods using long double-stranded (dsRNA) and small interfering RNA (siRNA) were developed using whole plant and detached leaf assays. Method optimization utilized the azole-fungicide target CYP51. Ten additional powdery mildew targets were screened identifying 5 novel genes that contribute to fungal proliferation: lipase a, lipase 1, β-carotene 15,15′-dioxygenase, apoptosis-antagonizing transcription factor (AATF), and effector candidate 2. Translation of these methods to the Erysiphe necator-Vitis vinifera pathosystem showed similar reduction in disease with SIGS against CYP51. Furthermore, SIGS against the five effective targets, including AATF, identified in the G. orontii-A. thaliana pathosystem also showed reduced fungal proliferation in grapevine suggesting high throughput screening of targets in the G. orontii-A. thaliana pathosystem could prioritize targets for testing in the grapevine powdery mildew system. SIGS may be the future of controlling powdery mildew growth on crops because of its flexibility, resilience to resistance development, reduced environmental and health risks, and rapid transition from the bench to the field.

### Introduction

[0873] Powdery mildews are widespread obligate biotrophic pathogens that infect a variety of agriculturally important crops (Agrios, 2004). Hosts like grapevine require fungicides to control infection, though there are increasing needs for other options to manage disease due to fungicide resistance and increasing human health and environmental concerns associated with fungicide application (Calvert et al., 2008; Frenkel et al., 2015; Jones et al., 2014; Zubrod et al., 2014). Erysiphe necator, which causes grape powdery mildew, is especially troublesome for California grape growers as dominant cultivars are susceptible.

[0874] Powdery mildew disease management accounts for 74% of pesticide use amounting to 9% of table and raisin grape production costs and up to 20% of wine grape production costs of highly susceptible cultivars like chardonnay wine grapes in the Central Coast of California (Fuller et al., 2014). Sulfur is heavily used in the grape industry to prevent fungal disease. Although cheap and effective, sulfur is routinely applied during high disease pressure every 7-10 days (Jones et al., 2014) which can cause respiratory symptoms in workers and people living in the area (Raanan et al., 2017). In addition, some wine producers are concerned about a potential impact of sulfur on taste when applied repeatedly later in the growing season. Fungicides including azole-fungicides (demethylase inhibitors) are also used to control powdery mildew disease. These fungicides inhibit CYP51 function, which is required for sterol biosynthesis, a component of fungal cell membranes (Frenkel et al., 2015). Powdery mildew isolates that have increased resistance to azole-fungicides have increased expression of CYP51 and acquire mutations that decrease azole-fungicide sensitivity (Frenkel et al., 2015; Jones et al., 2014).

[0875] RNA interference (RNAi) strategies are being developed to offer additional solutions to combat plant disease. These tools utilize conserved eukaryotic host and/or pathogen RNAi machinery to mediate silencing of pathogen genes by degrading messenger RNA (Majumdar et al., 2017). Double-stranded RNA (dsRNA) can be provided by the host plant using host-induced gene silencing (HIGS) and has been demonstrated to be effective in reducing barley powdery mildew infection (Pliego et al., 2013) and other fungal diseases like Fusarium head blight (Machado et al., 2018), wheat stripe rust (Zhu et al., 2017), and grey mold (Xiong et al., 2019) suggesting plant-mediated RNA uptake is widespread. HIGS, however, requires the use of transgenic crops which can require years of engineering to create the transgenic host contributing to high production costs. Despite years of advancement, there are limited RNAi based plant products in the marketplace (Bramlett et al., 2020). Spray-induced gene silencing (SIGS) offers a higher throughput and adaptable strategy that is not transgenic. Much like HIGS, it relies on endogenous RNAi machinery to mediate gene silencing of critical pathogen genes. The necrotrophic fungus Botrytis cinerea has been shown to directly uptake RNA from the environment. Both long dsRNA and small RNAs (sRNAs) applied onto plants limited infection of B. cinerea (Wang et al., 2016). This strategy has the potential to be readily adaptable to more than one crop or pest. It requires that the pest is able to take up dsRNA and/or siRNA, has endogenous RNAi machinery, and has sequenced transcripts to target. SIGS has been shown to be effective in reducing disease in many fungal and oomycete pathogens with various lifestyles including obligate biotrophs, Hyaloperonospora arabidopsidis (Bilir et al., 2019) and Phakopsora pachyrhizi (Hu et al., 2020), the hemibiotroph, Fusarium graminearum (Koch et al., 2016), and the necrotroph, B. cinerea (Wang et al., 2016).

[0876] In this study, we developed SIGS methods in the Golovinomyces orontii-Arabidopsis thaliana model system using CYP51 as the positive control gene target (Koch et al., 2016) and translated these methods to the agriculturally relevant system, Vitis vinifera-Erysiphe necator. SIGS phenotypes can be detected at early time points in infection using microscopic hyphal length measurements or at later stages by quantifying fungal spore production. Both siRNAs (small interfering RNAs) and long dsRNAs were shown to be effective in reducing powdery mildew growth and reproduction. After screening methods were optimized, ten additional conserved powdery mildew genes were selected for testing. SIGS against five of these targets significantly reduce spore production and represent diverse target genes that function as metabolic enzymes, regulatory genes, and secreted protein effectors. These five, including AATF, were silenced in grapevine, with results similar to Arabidopsis, showing findings in Arabidopsis translates to other agronomic species. Through this research we can rapidly identify important powdery mildew gene targets suitable for RNAi-based control of powdery mildew disease.

### Results

G. orontii Spores can Take Up Environmental RNA

[0877] To determine if G. orontii can uptake RNA directly from its environment, germinated conidia were incubated with in vitro transcribed Fluorescein-labeled P-actin-Mouse RNA (300 bp) using methods adapted from (Wang et al., 2016). To ensure RNA signal was intracellular, RNases were added before imaging. Powdery mildew uptake of RNA is rapid and observed within 1.5 hours of application demonstrating powdery mildews can uptake RNA independent from the host plant. Fluorescein was observed in all tissues present: germinated conidia, germ tubes of germinated conidia, and ungerminated conidia (FIG. 1). Not all spores observed had fluorescein signal, possibly indicating more time would be required to observe uptake in all cells or not all spores were at the appropriate stage for uptake.

siRNA and Long dsRNA Design

[0878] siRNA and/or long dsRNA was designed for each gene target selected (FIG. 2, Table 5). Analysis was performed to minimize off-target impacts and incorporate known features of efficient siRNA design. The online resource pssRNAit was used to minimize off-target silencing in the host (A. thaliana or V. vinifera) and identify efficient siRNAs and dsRNAs in silico (FIG. 2). Known features of efficient siRNAs were incorporated into siRNA design (Mittal, 2004; Reynolds et al., 2004; Ui-Tei et al., 2004). Long dsRNAs in this study were 199-449 bps and siRNAs were composed of 21 base long sense and antisense strands that anneal over 19 bases with 2 base overhangs at the 3′ ends. Where applicable, dsRNAs were also designed to anneal to multiple copies of the gene where possible as there are varying degrees of sequence conservation among copies.

TABLE 5
Gene information for G. orontii MGH1 targets selected for spray-induced silencing.

| | Putative | Putative | | | |
|---|---|---|---|---|---|
| Gene | Gene | Gene | Copy | | |
| Category | Symbol | Name | Number¹ | Annotated Domains¹ | Rationale |
| Metabolic | CYP51 | cytochrome | 2 | cytochrome P450 | Encodes the azole-fungicide |
| | | P450 51 | | | target, sterol 14a-demethylase. |
| | | | | | It is critical for ergosterol |
| | | | | | synthesis which is required for |
| | | | | | fungal cell membranes. |
| | | | | | Fusarium graminearum |
| | | | | | infection of barley is reduced |
| | | | | | by spray-induced gene |
| | | | | | silencing of CYP51.2 |
| | GDB1 | glycogen | 2 | amylo-alpha-1,6- | Glycogen is broken down in |
| | | debranching | | glucosidase, glycogen | germinating and developing |
| | | enzyme | | debranching enzyme | powdery mildew conidia.³ It is |
| | | | | (glucanotransferase | thought to fuel development |
| | | | | domain), N-terminal | from germination to |
| | | | | and central domain | penetration. Glycogen |
| | | | | from the human | breakdown can be visualized |
| | | | | glycogen debranching | with Lugol staining, showing |
| | | | | enzyme | reduced glycogen content in |
| | GPH1 | glycogen | 2 | carbohydrate | germinated spores.³ |
| | | phosphorylase | | phosphorylase | |
| | LIP1 | lipase 1 | 2 | carboxylesterase | Lipid droplets are components |
| | | | | family | of powdery mildew conidia |
| | LIPA | lipase A | 2 | lipase (class 3) | that are consumed and |
| | DGAT | diglyceride | 2 | MBOAT (membrane- | mobilized during germination |
| | | acyltransferase | | bound O- | of powdery mildew conidia.³ |
| | | | | acyltransferase family) | |
| | BCDO | P-carotene | 1 | retinal pigment | Abscisic acid (ABA) |
| | | 15,15- | | epithelial membrane | promotes biotic fungal |
| | | dioxygenase | | protein (carotenoid | interactions with plants and |
| | | | | oxygenase) | decreases plant immunity. |
| | | | | | Many pathogens are known to |
| | | | | | produce or modulate ABA |
| | | | | | biosynthesis in host plants.⁴ G. |
| | | | | | orontii may require host ABA |
| | | | | | precursor as most genes are |
| | | | | | lost in carotenoid |
| | | | | | biosynthesis.¹ A. thaliana |
| | | | | | ABA biosynthetic gene |
| | | | | | expression is modulated at the |
| | | | | | powdery mildew infection |
| | | | | | site.⁵ |
| | UTR4 | unidentified | 2 | haloacid | UTR4 is a 2,3- |
| | | transcript 4 | | dehalogenase-like | dioxomethiopentane-1- |
| | | | | hydrolase | phosphate enolase/ |
| | | | | | phosphatase involved in the |
| | | | | | methionine salvage pathway |
| | | | | | which allows cells to |
| | | | | | regenerate methionine and |
| | | | | | reuse sulfur. Saccharomyces |
| | | | | | cerevisiae utr4 mutants grow |
| | | | | | poorly on media lacking |
| | | | | | methionine and have a |
| | | | | | significantly lower growth |
| | | | | | rate.⁶ |
| Regulatory | GID9 | glucose- | 2 | LisH, CTLH/CRA C- | Involved in proteasome- |
| | | induced | | terminal to LisH motif | dependent catabolite |
| | | degradation | | domain | inactivation of gluconeogenic |
| | | 9 | | | enzymes fructose-1,6- |
| | | | | | bisphosphatase, |
| | | | | | phosphoenolpyruvate |
| | | | | | carboxykinase, and |
| | | | | | cytoplasmic malate |
| | | | | | dehydrogenase.^{7,8} Glucose and |
| | | | | | sucrose concentrations are |
| | | | | | enhanced in powdery mildew |
| | | | | | infected leaf apoplast.⁹ |
| | AATF/ | apoptosis- | 2 | apoptosis-antagonizing | Required for proliferation in |
| | Che-1 | antagonizing | | transcription factor (C- | mammalian systems and |
| | | transcription | | terminal), apoptosis | involved in many cellular |
| | | factor | | antagonizing | processes including cell stress |
| | | | | transcription factor | response and cell cycle |
| | | | | | control.¹⁰ Pathogens |
| | | | | | manipulate the expression of |
| | | | | | AATF.^{11,12} |
| Effector | EC2 | effector | 2 | CFEM domain | Transgenic A. thaliana |
| | | candidate 2 | | | expressing EC2 have |
| | | | | | increased entry by nonadapted |
| | | | | | powdery mildew.¹³ EC2 is |
| | | | | | among the most highly |
| | | | | | expressed genes in G. orontii |
| | | | | | MGH1 and is widely |
| | | | | | conserved in powdery |
| | | | | | mildews¹. |

¹G. orontii MGH1 (v4.0) genome annotated and accessed through MycoCosm (Grigoriev et al., 2014),
2(Koch et al., 2016),
³(Both et al., 2005),
⁴(Lievens et al., 2017),
⁵(Chandran et al., 2010),
⁶(Pirkov et al., 2008),
⁷(Braun et al., 2011),
⁸(Regelmann et al., 2003),
⁹(Aked and Hall, 1993),
¹⁰(Iezzi and Fanciulli, 2015)
¹¹(Benakanakere et al., 2019),
¹²(Kaul et al., 2009),
¹³(Schmidt et al., 2014).

siRNA and dsRNA Designed to Target G. orontii CYP51 Significantly Reduces Spore Production in A. Thaliana Whole Plant and Detached Leaf Assays

[0879] SIGS methods were optimized (FIG. 2) using the G. orontii MGH1 gene target, CYP51, which has been successfully silenced using SIGS to reduce growth of the fungal pathogen, F. graminearum (Koch et al., 2016). CYP51 function is required for sterol biosynthesis, a component of fungal cell membranes, and an azole-fungicide target (Frenkel et al., 2015). In G. orontii, there are two copies of CYP51 with 98.1% sequence identity. Two 21 bp siRNAs, siRNA-1 and siRNA-2, and two long dsRNAs, dsRNA-1 and dsRNA-2, targeting different regions of CYP51 were designed (FIG. 3, panel a).

[0880] The spraying methods, amount of RNA, number of RNA applications, timing of RNA application, RNA purification methods, and detached leaf or whole plant protocols were troubleshooted as part of SIGS protocol development to improve the efficiency and reproducibility of results (FIG. 2). Concentrations of dsRNA tested ranged from 10-80 ug/ml. The impact of SIGS on growth was measured by determining the asexual reproductive output as measured by harvesting infected tissue, liberating spores in 0.01% Tween-80, and determining the concentration of spores in suspensions (e.g., as adapted from WeBling et al., 2014). We focused on phenotyping fungal growth by measuring spore production as spores are what propagate the fungus and it can be rapidly assessed. For all experiments, results from control treatments with buffer alone were compared with the RNA-treated samples.

[0881] In whole plant and detached leaf experiments using CYP51 dsRNA-1, spore production decreased by an average of 46% and 30% respectively (FIG. 3, panel b) and visually less powdery mildew coverage and density was observed on dsRNA-sprayed plants than buffer control-sprayed plants (FIG. 3, panel c). Spore production was similarly reduced on average by 35% and 40% in whole plant and detached leaf CYP51 siRNA-1 treated samples, respectively (FIG. 3, panel b). These results show that SIGS against the G. orontii CYP51 target can reproducibly limit powdery mildew disease on Arabidopsis.

[0882] By contrast, the CYP51 dsRNA-2 and siRNA-2 treated samples did not affect fungal growth as spore production was similar to the control samples (FIG. 3, panel b). This is in accordance with previous findings that a negative result does not mean the targeted transcript is not important to the phenotype assessed; instead, the negative result can be due to poor silencing efficiency of a particular siRNA or long dsRNA for reasons not yet understood (Wu et al., 2004). The lack of impact of CYP51 dsRNA-2 and siRNA-2 on G. orontii spore production also indicates that the addition of dsRNA or siRNA alone does not impact powdery mildew growth.

Targeting CYP51 Significantly Reduces G. orontii Hyphal Length on A. Thaliana Detached Leaves

[0883] To see the impact of SIGS on early G. orontii colony development, we measured the impact of CYP51 siRNA-1 on hyphal length at 2 and 3 dpi in A. thaliana detached leaf assays. Observing the hyphal length of colonies is more time consuming compared to measuring spore production, requiring fixing and staining of harvested leaves, fluorescence microscopy, and image analysis, but may reveal early infection phenotypes masked at later points in infection. The average total hyphal length of CYP51 siRNA-1 colonies was significantly reduced at 2 and 3 dpi by 56% and 45% respectively compared to control samples (FIG. 3, panel e). Although the length was reduced, the branching architecture was not altered (FIG. 3, panel d). Coupled with the similar decrease in spore production with CYP51 siRNA-1 treatment (FIG. 3, panel b), this suggests the SIGS treatment against the cell membrane sterol biosynthetic enzyme CYP51 target was reproducibly effective in limiting powdery mildew growth, but was unable to fully prevent it. This could be due to a number of factors including RNA stability, design, uptake efficiency, and mobility that can be further optimized. In summary, the optimized SIGS protocol provides a high throughput means of screening for key powdery mildew targets of import to its proliferation. The extent of growth limitation for given target can be subsequently optimized. Finally, those targets without a powdery mildew disease phenotype are not necessarily unimportant; additional dsRNA and/or siRNAs would need to be designed and tested.

dsRNA Designed to Target Metabolic, Regulatory, and Effector Genes Identifies Novel Powdery Mildew Targets that Contribute to G. orontii Spore Production on A. Thaliana

[0884] To identify novel powdery mildew genes that contribute to its growth and development, metabolic, regulatory, and effector genes were targeted using SIGS to determine their impact on proliferation (spore production). Spore production was chosen for screening as it results in the propagation of the infection in the field and therefore is most relevant as an agricultural disease outcome assessment. dsRNA was chosen for initial screening as multiple siRNAs are generated from each dsRNA increasing the likelihood of a successful silencing outcome.

[0885] The gene targets were chosen based on their annotation and potential function such as maintaining essential cell function, mobilizing spore energy reserves early in powdery mildew development and/or manipulating the plant host. In addition, pattern and magnitude of expression of the genes through development, number of highly similar genes, and putative positioning in a metabolic or regulatory pathway was considered (Table 5, FIG. 5, FIG. 8). In addition to CYP51, powdery mildew gene targets tested consist of G. orontii MGH1 homologs of unidentified transcript 4 (UTR4), glycogen debranching enzyme 1 (GDB1), glycogen phosphatase 1 (GPH1), lipase 1 (LIP1), lipase a (LIPA), diglyceride acyltransferase (DGAT), β-carotene 15,15′-dioxygenase (BCDO), glucose-induced degradation 9 (GID9), apoptosis-antagonizing transcription factor (AATF), and effector candidate 2 (EC2) (Table 5, FIG. 4). A brief rationale on why these targets were selected is presented in Table 5. All targets were tested using A. thaliana whole plant assays. A portion of those genes were also tested in the detached leaf assay to compare the outcome based on the assay type. SIGS against four out of these ten targets tested reproducibly and significantly reduced fungal proliferation (FIG. 4). For initial screening, this gives a 40% success rate in identifying single powdery mildew targets important to fungal proliferation.

[0886] As previously shown, SIGS against CYP51 involved in maintaining cell function (membrane component generation) resulted in an average spore reduction of 46% when compared to control treatment (FIG. 4). Consistent with its essential cellular function, normalized CYP51 expression (to total RNA) is essentially stable across the infection timeline (Black box, FIG. 5). The metabolic gene, UTR4, an enzyme in the methionine salvage pathway (Pirkov et al., 2008), allows cells to regenerate methionine and reuse sulfur (Table 5). UTR4 expression levels are very high and unlike CYP51, UTR4 expression dramatically peaked at 6 hpi (Grey box, FIG. 5). This suggests it is utilized early in development before the haustorium is developed and plant nutrients are acquired. No SIGS phenotype was observed with the tested dsRNA against UTR4 (FIG. 4). However, SIGS using additional UTR4 dsRNAs and dsRNAs against other powdery mildew genes in the methionine salvage pathway should be explored.

[0887] A number of targets were chosen because they could play a role in breaking down and mobilizing/metabolizing spore glycogen or storage lipids to provide energy and metabolic precursors for early development and growth of the fungus before the haustorium has fully developed (FIG. 2). As shown in FIG. 5 (blue box), the genes encoding biosynthetic enzymes GDB1 and GPH1 and the regulatory enzyme GID9 all exhibit peaks of expression before the haustorium is fully developed. These enzymes are postulated to play a role in mobilizing energy and precursors from spore glycogen (Table 5). SIGS against these targets did not impact spore production (FIG. 4). The impact of other dsRNAs targeting these genes and this process remains to be explored. However, the similar findings for all three targets tested suggests that spore glycogen mobilization is not the prime contributor to spore germination and early colonization events.

[0888] Three metabolic genes involved in storage lipid metabolism were targeted with SIGS: lipases LIP1 and LIPA and DGAT. Triacylglycerol lipases hydrolyze triacylglycerols producing fatty acids and glycerol while diglyceride acyltransferases form triglycerides from diacylglycerol and acyl-CoA. Triacylglycerols are stored in lipid droplets in spores and are degraded to build membranes and fuel cellular metabolism (Subramoni et al., 2010). SIGS of LIP1 reduced growth an average of 22% and 51% in whole plant and detached leaf experiments, respectively (FIG. 4). SIGS of LIPA reduced growth an average of 41% and 67% in whole plant and detached leaf experiments, respectively (FIG. 4). There are 2 copies of LIPA and 2 copies of LIP1; the dsRNA was designed to silence both copies. All copies of these lipases are most highly expressed within 12 hpi (Light blue box, FIG. 5). This suggests these lipases may be especially important for obligate biotrophs before the haustorium is fully developed. In contrast to the glycogen mobilization targets, initial screening of storage lipid mobilization targets resulted in 2 of 3 tested with a reproducible significant reduction in powdery mildew spore production. This suggests spore storage lipid breakdown/mobilization may contribute more to initial powdery mildew growth and development than glycogen breakdown/mobilization.

[0889] Manipulation of the plant host by pathogens can take many forms and is a key feature of the evolved interaction of an obligate biotroph with its host. Carotenoid oxygenases (members of the BCDO family) are enzymes responsible for cleaving carotenoids and have been identified in plants, fungi, animals, and bacteria (Ahrazem et al., 2016; Tan et al., 2003). They can function in diverse roles including signaling in response to environmental cues, regulation, and biosynthesis. In G. orontii MGH1, the targeted BCDO is further specified as a 9-cis-epoxycarotenoid dioxygenase (EC 1.1.3.11.51) involved in ABA biosynthesis (FIG. 9). In addition, another ABA biosynthetic gene encoding xanthoxin dehydrogenase (EC 1.1.1.288) is also annotated as being present in G. orontii MGH1. The low and variable expression of this target gene as shown in FIG. 5 (green box) does not allow us to further postulate on its involvement in a specific phase of infection. However, SIGS using long dsRNA targeting G. orontii MGH1 BCDO had a significant impact on growth, reducing spore production by 50% in whole plant experiments, the highest average reduction observed among the whole plant experiments (FIG. 4). Reduction was also seen in detached leaf assays with long dsRNA reducing spore production by 54% (FIG. 4).

[0890] The powdery mildew apoptosis antagonizing transcription factor, AATF, could mediate fungal response to plant-induced cell stress (Table 5). Alternately, it could be secreted into the plant by a yet unknown mechanism to limit cell death. AATF expression increases with infection through 24 hpi and then remains elevated (FIG. 5, green box). SIGS of AATF was found to reduce spore production an average of 21% and 32% in whole plant and detached leaf assays, respectively (FIG. 4). Only the detached leaf experiment showed the reduced growth to be statistically significant (FIG. 4). This reduction in spore production is close to the resolution of spore counting. However, based on its potential functions, it remains an interesting target for further analysis.

[0891] Effectors are secreted proteins that manipulate plant functions. EC2 is a widely conserved powdery mildew effector protein first described in B. graminis f. sp. hordei as BEC2 (CSEP0214; (Schmidt et al., 2014). Both copies of EC2 in G. orontii MGH1 are extremely highly expressed, with one copy being the most highly expressed gene in the fungal transcriptome (FIG. 5, green box). SIGS using long dsRNA against EC2 did not impact spore production (FIG. 4). However, given the fact that expression of EC2 in transgenic A. thaliana increased non-host powdery mildew penetration (Schmidt et al., 2014), we decided to further test it using siRNA (below).

siRNA Targeting BCDO and EC2 Significantly Reduces G. orontii Spore Production on A. Thaliana Detached Leaves

[0892] The efficacy of siRNAs was further tested using the gene targets BCDO and EC2 in A. thaliana detached leaf assays (FIG. 6). siRNA targeting BCDO was tested because the long dsRNA SIGS experiments consistently showed very strong suppression of spore production (FIG. 4). SIGS of EC2 did not show reduced spore production (FIG. 4) using dsRNA, but given its demonstrated role in powdery mildew pathogenesis (Schmidt et al., 2014), it was worth testing another silencing RNA (FIG. 4). BCDO siRNA sprayed leaves visually had less powdery mildew growth and chlorosis (FIG. 6, panel a). Spore production was reduced an average of 42% (FIG. 6, panel b), providing further confirmation for the role of BCDO in promoting powdery mildew proliferation. SIGS using siRNA-1 EC2 reduced growth an average of 66% (FIG. 6, panel b), showing EC2 does promote powdery mildew proliferation and the EC2 dsRNA previously tested (FIG. 4) was not effective. This result shows that known powdery mildew effectors, even those that are very highly expressed, can be targeted via SIGS to reduce powdery mildew growth and development.

SIGS Methods and Gene Target AATF Translate to the Erysiphe Necator-Vitis vinifera Pathosystem

[0893] With SIGS methods optimized and gene targets identified, we sought to translate these methods and targets to grape powdery mildew (FIG. 2). New long dsRNAs were designed for each target tested as there is significant sequence divergence between G. orontii MGH1 and E. necator c. First, procedures were optimized for the grapevine system by silencing CYP51. Spore production was reduced by 62% and 45% in grapevine whole plant and leaf disc assays, respectively when treated with long dsRNA against the same region of CYP51 as dsRNA-1 against G. orontii MGH1 CYP51 (FIG. 2; FIG. 7, panel a). In addition, visual inspection showed infected grape leaves had less powdery mildew coverage and density when sprayed with dsRNA targeting CYP51 than with buffer alone (FIG. 7, panel b). We tested SIGS against the effective targets including AATF in the grapevine system, as we were interested in ascertaining whether they would show a statistically significant difference in grape powdery mildew spore production. The SIGS target, AATF, exhibited on average of 53% reduced spore production in E. necator when silenced with long dsRNA (FIG. 7). The average reduction of powdery mildew spore production for SIGS against CYP51 and AATF was greater in E. necator compared to G. orontii (FIG. 4 and FIG. 7). One notable difference is G. orontii has 2 copies each of CYP51 and AATF while E. necator has 1 copy of each of these genes. SIGS against the other effective targets also were effective in reducing powdery mildew of grapevine (FIG. 7). These results indicate we can successfully translate work performed using the Arabidopsis powdery mildew system to the grapevine powdery mildew system.

### Discussion

[0894] We developed a high-throughput assay to silence powdery mildew genes and determine their contribution to disease (FIG. 2). Our success in SIGS of powdery mildew targets is consistent with HIGS working in the powdery mildew, B. graminis (Pliego et al., 2013), and genes encoding the required endogenous RNAi machinery being annotated in G. orontii MGH1 v4.0 genome. Screening gene targets in Arabidopsis powdery mildew is rapid (FIG. 2) and provides insight into genes important for powdery mildews, as about 86% of dicot powdery mildew and 77% of dicot and monocot powdery mildew genes are conserved (Wu et al., 2018). Furthermore, as obligate biotrophs, powdery mildews have few genes relative to other Ascomycota (Wu et al., 2018) making target testing using the G. orontii-A. thaliana pathosystem an efficient means of prioritizing targets to test in other powdery mildew-plant host interactions. A. thaliana plants have a quick generation time, can be highly controlled in growth chambers, and require little space for multiple replicates compared to many powdery mildew-impacted crops making this system valuable in quickly identifying novel gene targets.

[0895] In this study we also demonstrated SIGS methods and conserved targets in G. orontii can translate to the grape powdery mildew E. necator and we anticipate they can translate to other powdery mildews. All five genes targets identified in G. orontii that were tested in E. necator with SIGS also impacted growth and reproduction (see, e.g., FIG. 7). For example, the gene target AATF was found to contribute to G. orontii spore production (FIG. 4) with an even greater impact on E. necator (FIG. 7). AATF expression is modulated upon pathogen infection (Benakanakere et al., 2019; Kaul et al., 2009) and in cancer cells (Iezzi and Fanciulli, 2015) to prolong the life of a cell. If the powdery mildew AATF is secreted into the plant, by a yet undefined means, it could potentially prolong plant cell life and inhibit cell death, features of critical import to obligate biotrophy. If it functions in the fungi, it could act to maintain normal cellular function in the presence of plant-induced stress. Other regulators of cell fate should be tested via SIGS to identify additional important targets.

[0896] Using SIGS we probed the importance of ten metabolic, regulatory, and effector genes and identified five powdery mildew targets that impact G. orontii MGH1 spore production (FIGS. 4, 6). When screening targets, multiple long dsRNAs or siRNAs may need to be tested in order to determine the contribution of a gene. The efficiency of siRNA mediated silencing depends on several factors including the accessibility of target region, structural features of the siRNA leading to efficient loading of antisense strand of siRNA into RISC complex (Reynolds et al., 2004; Ui-Tei et al., 2004). Our preliminary screen also highlights the importance of screening multiple genes involved in a process in an initial screen to increase the likelihood of identifying at least one with a powdery mildew phenotype when screened with an initial dsRNA. For example, 2/3 genes tested involved in storage lipid metabolism exhibited reduced spore production when sprayed with long dsRNA (FIG. 4). By contrast, 3/3 genes involved in glycogen metabolism did not show reductions in powdery mildew proliferation when sprayed with long dsRNA suggesting this process is not as critical to the success of the infection.

[0897] Homologs of lipases lipase a and lipase 1 proved to be significant contributors to powdery mildew growth on A. thaliana. In the powdery mildew, Blumeria graminis f. sp. hordei, lipases fall into 3 distinct expression patterns. Group III lipase expression remains constant throughout infection while group I lipase expression is elevated in ungerminated spores and at 4 hpi, decreasing as the infection progresses and group II expression is suppressed in haustoria tissue (Both et al., 2005). Lipid staining of developing powdery mildew spores reflects the activity of class I lipases suggesting lipids are consumed to fuel development before nutrient acquisition from the host begins (Both, et al. 2005). Later in infection these lipases or others can potentially be used for lipid remodeling for triacylglycerol storage in newly formed spores (Laureano et al., 2018), suggesting lipases have various functions and are regulated by development. The early expression of LIPA and LIP1 (FIG. 5) indicates they behave like group I lipases which are presumably required early in development to facilitate mobilization of energy. Extracellular lipase, LIP1, in the necrotrophic pathogen B. cinerea is induced by exposure to grape cuticle, but lip1 mutants do not have reduced lesion formation (Subramoni et al., 2010). Similarly, lip1 mutants of the hemibiotrophic pathogen, F. graminearum, does not impact virulence (Subramoni et al., 2010). For a biotrophic pathogen such as powdery mildew, dependent initially on its own spore reserves for early growth and development, it appears that LIPA and LIP1 may play more critical roles.

[0898] SIGS against the powdery mildew BCDO-family gene provided the most dramatic reduction in powdery mildew proliferation of the targets tested (FIGS. 4, 6). Carotenoid-cleaving enzymes can have diverse functions in plants, fungi, animals, and bacteria (Ahrazem et al., 2016; Tan et al., 2003). In G. orontii MGH1, the targeted BCDO is further specified as a 9-cis-epoxycarotenoid dioxygenase (EC 1.1.3.11.51) involved in ABA biosynthesis (FIG. 9). In addition, another ABA biosynthetic gene encoding xanthoxin dehydrogenase (EC 1.1.1.288) is also annotated as being present in G. orontii MGH1 supporting this putative function. Diverse fungi have been described to produce ABA, though this trait appears restricted to plant-associated fungi (Asselbergh et al., 2008). Expression of A. thaliana genes in this pathway is modulated in response to powdery mildew infection (Chandran et al., 2010). These changes may promote the formation of violaxanthin from zeaxanthin (upstream of ABA formation) via NPQ4 which is down-regulated in high-light conditions. Not only is this shift providing precursors for ABA biosynthesis but also provides additional support for the source to sink transition imposed by infection. In the rice-Magnaporthe oryzae interaction, exogenous application of ABA promotes germination and fungal ABA biosynthesis mutants have impaired lesion formation on rice (Spence et al., 2015).

[0899] Powdery mildews and other fungal pathogens can have hundreds of putative effectors identified through genomics with few having any annotated domains (de Jonge et al., 2011). These effector repertoires expand and contract in fungal pathogens allowing new adaptations to emerge at the host-pathogen interface (Fouche et al., 2018). The effector EC2 is a highly expressed powdery mildew effector (FIG. 5) with a cysteine-rich fungal extracellular membrane (CFEM) domain. CFEM domains have proposed roles in fungal pathogenesis (Kulkarni et al., 2003). Transgenic A. thaliana expressing EC2 have increased entry by non-adapted powdery mildew (Schmidt et al., 2014), demonstrating its contribution to pathogenesis of powdery mildews as well. EC2 also significantly contributes to G. orontii growth and reproduction on A. thaliana (FIG. 6). In G. orontii, EC2 is expressed 1-2 orders of magnitude higher than the other genes targeted in this study (FIG. 5). Despite being highly expressed, SIGS against EC2 still had a significant impact on powdery mildew proliferation. EC2 is highly expressed by many fungal pathogens suggesting it may represent a broad fungal target for an RNA-based pesticide.

[0900] SIGS has the potential to revolutionize agriculture if RNA pesticides prove to be efficacious in controlling pathogen growth. SIGS methods were translated to identify agriculturally important targets to be used for pest management. Using SIGS we can rapidly identify novel targets and adapt RNA constructs to the strain-specific sequences of target genes present in the field. We anticipate these RNA pesticides are more evolutionarily robust to resistance compared to chemical fungicides. Pathogens challenged with RNA pesticides would have to accumulate many mutations in the targeted gene sequence to avoid silencing, while pathogens challenged with azole-fungicides, for example, may only require a mutation in the enzyme binding site to avoid inhibition. If resistance does develop to an RNA pesticide, other dsRNAs targeting other parts of the gene can be developed to effectively silence the same gene or dsRNAs targeting other genes in the same pathway or cellular process can be designed and tested. Additionally, pathogens could downregulate RNAi processes to develop resistance to RNA pesticides, however, silencing RNAi machinery during fungal infection also impairs growth (Werner et al., 2020). Multiple required cellular processes could potentially be targeted at once by multiplexing dsRNAs. Or dsRNAs against multiple genes in a given process or pathway could be multiplexed to further increase efficacy. Finally, the efficiency of uptake and duration of gene silencing may be improved, for example by encapsulating dsRNAs in liposomes or complexing dsRNAs to clay nanosheets (Cagliari et al., 2019).

[0901] The optimization of SIGS in powdery mildews provides a novel and versatile approach to study genetics in the obligate biotroph, powdery mildew. To our knowledge, this is the first report of SIGS in powdery mildew fungi. Using this high-throughput SIGS and disease assay pipeline, we can more rapidly assess the importance of a gene on powdery mildew growth and development, removing the plasmid construction steps required for virus-induced gene silencing (VIGS) and the transformation steps required for HIGS. SIGS provides a rapid methodology to study gene function in powdery mildews which are not culturable apart from the host and not genetically tractable. Given the conservation of retained genes and essential processes in obligate biotrophs (Spanu 2012), targets identified in the powdery mildew-plant host system may translate to other plant (obligate) biotrophs as well as human intracellular pathogens.

### REFERENCES

[0902] Agrios, G., 2004. Plant Pathology, 5th ed. Elsevier Inc.
[0903] Ahrazem, O., Gomez-Gomez, L., Rodrigo, M. J., Avalos, J., Limon, M. C., 2016. Carotenoid cleavage oxygenases from microbes and photosynthetic organisms: Features and functions. International Journal of Molecular Sciences 17. doi.org/10.3390/ijms17111781
[0904] Aked, J., Hall, J. L., 1993. Effect of powdery mildew infection on concentrations of apoplastic sugars in pea leaves. New Phytologist 123, 283-288. doi.org/10.1111Zj.1469-8137.1993.tb03737.
[0905] Asselbergh, B., de Vleesschauwer, D., Hofte, M., 2008. Global switches and fine-tuning-ABA modulates plant pathogen defense. Molecular Plant-Microbe Interactions 21, 709-719. doi.org/10.1094/MPMI-21-6-0709.
[0906] Benakanakere, M. R., Zhao, J., Finoti, L., Schattner, R., Odabas-Yigit, M., Kinane, D. F., 2019. MicroRNA-663 antagonizes apoptosis antagonizing transcription factor to induce apoptosis in epithelial cells. Apoptosis 24, 108-118. doi.org/10.1007/s10495-018-01513-9.
[0907] Bilir, O., Telli, O., Norman, C., Budak, H., Hong, Y., Tor, M., 2019. Small RNA inhibits infection by downy mildew pathogen Hyaloperonospora arabidopsidis. Molecular Plant Pathology 20, 1523-1534. doi.org/10.1111/mpp.12863.
[0908] Both, M., Csukai, M., Stumpf, M. P. H., Spanu, P. D., 2005. Gene Expression Profiles of Blumeria graminis Indicate Dynamic Changes to Primary Metabolism during Development of an Obligate Biotrophic Pathogen 17, 2107-2122. doi.Org/10.1105/tpc.105.032631.1.
[0909] Bramlett, M., Plaetinck, G., Maienfisch, P., 2020. RNA-Based Biocontrols-A New Paradigm in Crop Protection. Engineering 6, 522-527. doi.org/10.1016/j.eng.2019.09.008.
[0910] Braun, B., Pfirrmann, T., Menssen, R., Hofmann, K., Scheel, H., Wolf, D. H., 2011. Gid9, a second RING finger protein contributes to the ubiquitin ligase activity of the Gid complex required for catabolite degradation. FEBS Letters 585, 3856-3861. doi.org/10.1016/j.febslet.2011.10.038.
[0911] Cagliari, D., Dias, N. P., Galdeano, D. M., dos Santos, E. A., Smagghe, G., Zotti, M. J., 2019. Management of Pest Insects and Plant Diseases by Non-Transformative RNAi. Frontiers in Plant Science 10. doi.org/10.3389/fpls.2019.01319.
[0912] Calvert, G. M., Karnik, J., Mehler, L., Beckman, J., Morrissey, B., Sievert, J., Barrett, R., Lackovic, M., Mabee, L., Schwartz, A., Mitchell, Y., Moraga-McHaley, S., 2008. Acute pesticide poisoning among agricultural workers in the United States, 1998-2005. American Journal of Industrial Medicine 51, 883-898. doi.org/10.1002/ajim.20623.
[0913] Chandran, D., Inada, N., Hather, G., Kleindt, C. K., Wildermuth, M. C., 2010. Laser microdissection of Arabidopsis cells at the powdery mildew infection site reveals site-specific processes and regulators. Proceedings of the National Academy of Sciences of the United States of America 107, 460-465. doi.org/10.1073/pnas.0912492107.
[0914] de Jonge, R., Bolton, M. D., Thomma, B. P. H. J., 2011. How filamentous pathogens co-opt plants: The ins and outs of fungal effectors. Current Opinion in Plant Biology 14, 400-406. doi.org/10.1016/j.pbi.2011.03.005.
[0915] Fouche, S., Plissonneau, C., Croll, D., 2018. The birth and death of effectors in rapidly evolving filamentous pathogen genomes. Current Opinion in Microbiology 46, 34-42. doi.org/10.1016/j.mib.2018.01.020.
[0916] Frenkel, O., Cadle-Davidson, L., Wilcox, W. F., Milgroom, M. G., 2015. Mechanisms of resistance to an azole fungicide in the grapevine powdery mildew fungus, Erysiphe necator. Phytopathology 105, 370-377. doi.org/10.1094/PHYTO-07-14-0202-R.
[0917] Fuller, K. B., Alston, J. M., Sambucci, O. S., 2014. The value of powdery mildew resistance in grapes: Evidence from California. Wine Economics and Policy 3, 90-107. doi.org/10.1016/j.wep.2014.09.001.
[0918] Grigoriev, I. v., Nikitin, R., Haridas, S., Kuo, A., Ohm, R., Otillar, R., Riley, R., Salamov, A., Zhao, X., Korzeniewski, F., Smirnova, T., Nordberg, H., Dubchak, I., Shabalov, I., 2014. MycoCosm portal: Gearing up for 1000 fungal genomes. Nucleic Acids Research 42, 699704. doi.org/10.1093/nar/gkt1183.
[0919] Hu, D., Chen, Z. Y., Zhang, C., Ganiger, M., 2020. Reduction of Phakopsora pachyrhizi infection on soybean through host- and spray-induced gene silencing. Molecular Plant Pathology 21, 794-807. doi.org/10.1111/mpp.12931.
[0920] Iezzi, S., Fanciulli, M., 2015. Discovering Che-1/AATF: A new attractive target for cancer therapy. Frontiers in Genetics 6, 1-7. doi.org/10.3389/fgene.2015.00141.
[0921] Jones, L., Riaz, S., Morales-Cruz, A., Amrine, K. C., McGuire, B., Gubler, W., Walker, M., Cantu, D., 2014. Adaptive genomic structural variation in the grape powdery mildew pathogen, Erysiphe necator. BMC Genomics 15, 1081. doi.org/10.1186/1471-2164-15-1081.
[0922] Kaul, D., Ahlawat, A., Gupta, S. D., 2009. HIV-1 genome-encoded hiv1-mir-H1 impairs cellular responses to infection. Molecular and Cellular Biochemistry 323, 143-148. doi.org/10.1007/s11010-008-9973-4.
[0923] Koch, A., Biedenkopf, D., Furch, A., Weber, L., Rossbach, O., Abdellatef, E., Linicus, L., Johannsmeier, J., Jelonek, L., Goesmann, A., Cardoza, V., McMillan, J., Mentzel, T., Kogel, K. H., 2016. An RNAi-Based Control of Fusarium graminearum Infections Through Spraying of Long dsRNAs Involves a Plant Passage and Is Controlled by the Fungal Silencing Machinery. PLoS Pathogens 12, 1-22. doi.org/10.1371/journal.ppat.1005901.
[0924] Kulkarni, R. D., Kelkar, H. S., Dean, R. A., 2003. An eight-cysteine-containing CFEM domain unique to a group of fungal membrane proteins. Trends in Biochemical Sciences 28, 118121. doi.org/10.1016/SO968-0004(03)00025-2.
[0925] Laureano, G., Figueiredo, J., Cavaco, A. R., Duarte, B., Cagador, I., Malho, R., Sousa Silva, M., Matos, A. R., Figueiredo, A., 2018. The interplay between membrane lipids and phospholipase A family members in grapevine resistance against Plasmopara viticola. Scientific Reports 8, 1-15. doi.org/10.1038/s41598-018-32559-z.
[0926] Lievens, L., Pollier, J., Goossens, A., Beyaert, R., Staal, J., 2017. Abscisic acid as pathogen effector and immune regulator. Frontiers in Plant Science 8, 1-15. doi.org/10.3389/fpls.2017.00587.
[0927] Machado, A. K., Brown, N. A., Urban, M., Kanyuka, K., Hammond-Kosack, K. E., 2018. RNAi as an emerging approach to control Fusarium head blight disease and mycotoxin contamination in cereals. Pest Management Science 74, 790-799. doi.org/10.1002/ps.4748.
[0928] Majumdar, R., Rajasekaran, K., Cary, J. W., 2017. RNA interference (RNAi) as a potential tool for control of mycotoxin contamination in crop plants: Concepts and considerations. Frontiers in Plant Science 8. doi.org/10.3389/fpls.2017.00200.
[0929] Martinez-Cruz, J., Romero, D., de Vicente, A., Perez-Garda, A., 2018. Transformation by growth onto agro-infiltrated tissues (TGAT), a simple and efficient alternative for transient transformation of the cucurbit powdery mildew pathogen Podosphaera xanthii. Molecular Plant Pathology 19, 2502-2515. doi.org/10.1111/mpp.12722.
[0930] Mittal, V., 2004. Improving the efficiency of RNA interference in mammals. Nature Reviews Genetics 5, 355-365. doi.org/10.1038/nrgl323.
[0931] Pirkov, I., Norbeck, J., Gustafsson, L., Albers, E., 2008. A complete inventory of all enzymes in the eukaryotic methionine salvage pathway. FEBS Journal 275, 4111-4120. doi.org/10.1111/j.1742-4658.2008.06552.x.
[0932] Pliego, C., Nowara, D., Bonciani, G., Gheorghe, D. M., Xu, R., Surana, P., Whigham, E., Nettleton, D., Bogdanove, A. J., Wise, R. P., Schweizer, P., Bindschedler, L. v., Spanu, P. D., 2013. Host-induced gene silencing in barley powdery mildew reveals a class of ribonuclease-like effectors. Molecular Plant-Microbe Interactions 26, 633-642. doi.org/10.1094/MPMI-01-13-0005-R.
[0933] Raanan, R., Gunier, R. B., Balmes, J. R., Beltran, A. J., Harley, K. G., Bradman, A., Eskenazi, B., 2017. Elemental sulfur use and associations with pediatric lung function and respiratory symptoms in an agricultural community (California, USA). Environmental Health Perspectives 125, 1-8. doi.org/10.1289/EHP528.
[0934] Ramanujam, R., Calvert, M. E., Selvaraj, P., Naqvi, N. I., 2013. The Late Endosomal HOPS Complex Anchors Active G-Protein Signaling Essential for Pathogenesis in Magnaporthe oryzae. PLoS Pathogens 9. doi.org/10.1371/journal.ppat.1003527.
[0935] Regelmann, J., Schule, T., Josupeit, F. S., Horak, J., Rose, M., Entian, K.-D., Thumm, M., Wolf, D. H., 2003. Catabolite Degradation of Fructose-1,6-bisphosphatase in the Yeast Saccharomyces cerevisiae: A Genome-wide Screen Identifies Eight Novel GID Genes and Indicates the Existence of Two Degradation Pathways. Molecular Biology of the Cell 14, 1652-1663. doi.org/10.1091/mbc.e02-08-0456.
[0936] Reuber, T. L., Plotnikova, J. M., Dewdney, J., Rogers, E. E., William Wood, B., Ausubel, F. M., 1998. Correlation of defense gene induction defects with powdery mildew susceptibility in Arabidopsis enhanced disease susceptibility mutants. Plant Journal 16, 473-485. doi.org/10.1046/j.1365-313X.1998.00319.x.
[0937] Reynolds, A., Leake, D., Boese, Q., Scaringe, S., Marshall, W. S., Khvorova, A., 2004. Rational siRNA design for RNA interference. Nature Biotechnology 22, 326-330. doi.org/10.1038/nbt936.
[0938] Schmidt, S. M., Kuhn, H., Micali, C., Liller, C., Kwaaitaal, M., Panstruga, R., 2014. Interaction of a Blumeria graminis f. sp. hordei effector candidate with a barley ARF-GAP suggests that host vesicle trafficking is a fungal pathogenicity target. Molecular Plant Pathology 15, 535-549. doi.org/10.1111/mpp.12110.
[0939] Spence, C. A., Lakshmanan, V., Donofrio, N., Bais, H. P., 2015. Crucial roles of abscisic acid biogenesis in virulence of rice blast fungus Magnaporthe oryzae. Frontiers in Plant Science 6, 1-13. doi.org/10.3389/fpls.2015.01082.
[0940] Subramoni, S., Suarez-Moreno, Z. R., Venturi, V., 2010. Lipases as Pathogenicity Factors of Plant Pathogens, in: Handbook of Hydrocarbon and Lipid Microbiology. Springer Berlin Heidelberg, Berlin, Heidelberg, pp. 3269-3277. doi.org/10.1007/978-3-540-77587-4_248.
[0941] Tan, B. C., Joseph, L. M., Deng, W. T., Liu, L., Li, Q. B., Cline, K., McCarty, D. R., 2003. Molecular characterization of the Arabidopsis 9-cis epoxycarotenoid dioxygenase gene family. Plant Journal 35, 44-56. doi.org/10.1046/j.1365-313X.2003.01786.x.
[0942] Ui-Tei, K., Naito, Y., Takahashi, F., Haraguchi, T., Ohki-Hamazaki, H., Juni, A., Ueda, R., Saigo, K., 2004. Guidelines for the selection of highly effective siRNA sequences for mammalian and chick RNA interference. Nucleic Acids Research 32, 936-948. doi.org/10.1093/nar/gkh247.
[0943] Wang, M., Weiberg, A., Lin, F. M., Thomma, B. P. H. J., Huang, H. da, Jin, H., 2016. Bidirectional cross-kingdom RNAi and fungal uptake of external RNAs confer plant protection. Nature Plants 2, 1-10. doi.org/10.1038/nplants.2016.151.
[0944] Werner, B. T., Gaffar, F. Y., Schuemann, J., Biedenkopf, D., Koch, A. M., 2020. RNA-Spray-Mediated Silencing of Fusarium graminearum AGO and DCL Genes Improve Barley Disease Resistance. Frontiers in Plant Science 11, 1-11. doi.org/10.3389/fpls.2020.00476.
[0945] WeBling, R., Panstruga, R., 2012. Rapid quantification of plant-powdery mildew interactions by qPCR and conidiospore counts. Plant Methods 8, 35. doi.org/10.1186/1746-4811-8-35.
[0946] Wu, W., Hodges, E., Redelius, J., Hoog, C., 2004. A novel approach for evaluating the efficiency of siRNAs on protein levels in cultured cells. Nucleic acids research 32, 1-6. doi.org/10.1093/nar/gnh010.
[0947] Wu, Y., Ma, X., Pan, Z., Kale, S. D., Song, Y., King, H., Zhang, Q., Presley, C., Deng, X., Wei, C. I., Xiao, S., 2018. Comparative genome analyses reveal sequence features reflecting distinct modes of host-adaptation between dicot and monocot powdery mildew 06 Biological Sciences 0604 Genetics. BMC Genomics 19, 1-20. doi.org/10.1186/s12864-018-5069-z
[0948] Xiong, F., Liu, M., Zhuo, F., Yin, H., Deng, K., Feng, S., Liu, Y., Luo, X., Feng, L., Zhang, S., Li, Z., Ren, M., 2019. Host-induced gene silencing of BcTOR in Botrytis cinerea enhances plant resistance to grey mould. Molecular Plant Pathology 20, 1722-1739. doi.org/10.1111/mpp.12873.
[0949] Zhu, X., Qi, T., Yang, Q., He, F., Tan, C., Ma, W., Voegele, R. T., Kang, Z., Guo, J., 2017. Host-induced gene silencing of the MAPKK gene PsFUZ7 confers stable resistance to wheat stripe rust. Plant Physiology 175, 1853-1863. doi.org/10.1104/pp. 17.01223.
[0950] Zubrod, J. P., Baudy, P., Schulz, R., Bundschuh, M., 2014. Effects of current-use fungicides and their mixtures on the feeding and survival of the key shredder Gammarus fossarum. Aquatic Toxicology 150, 133-143. doi.org/10.1016/j.aquatox.2014.03.00

### Example 2

### Powdery Mildew Effectors Targeting Arabidopsis TCP Transcription Factors Contribute to Disease

### Summary of Example 2

[0951] Plant TCP transcription factors that regulate growth and development are heavily targeted by effectors of diverse plant pathogens. In a yeast-two hybrid screen between Arabidopsis thaliana proteins and Golovinomyces orontii MPIPZ effectors, 34% of the interactions identified involved TCP proteins. In this study the contribution of TCPs and their targeting effectors during infection is measured. Four of the five TCPs targeted by effectors were found to suppress G. orontii MGH1 growth. Adult A. thaliana T-DNA mutants tcp13, tcp14, tcp15, and tcp20 were more susceptible to G. orontii MGH1. Using spray-induced gene silencing (SIGS), homologs of OECs in G. orontii MGH1 were targeted. When OEC14, OEC60/OEC61, and OEC70 were targeted via SIGS, significantly less spores were produced. Homolog OEC60/OEC61 was investigated further. It encodes a short N-terminal domain originally annotated in G. orontii MPIPZ OEC60 and OEC61 coupled to a larger glycosyl hydrolase family 17 domain (GH17). To date, OEC60 and OEC61 homologs across all sequenced powdery mildews include the GH17 domain, suggesting the lack of GH17 domain in the MPIPZ isolate may be due to the incomplete nature of that genome. GH17 domain-containing proteins are found widely in plants and fungi. When homolog of OEC60/OEC61 is silenced in the Erysiphe necator-grapevine system, significantly less spores are also produced, providing evidence this is a conserved powdery mildew virulence factor. Using Agrobacterium-mediated transient expression assays in Nicotiana benthamiana, G. orontii MGH1 homolog of OEC60/OEC61 was shown to be nuclear-targeted and co-localize with TCP13 and TCP14. Furthermore, co-immunoprecipitation shows OEC60/OEC61 interaction with TCP13 in planta. An analysis of available TCP13 and TCP14 Arabidopsis protein interaction data reveals a majority of targets interact with both TCP13 and 14; these targets are highly enriched in development and gene expression ontology. tcp14 mutants have enhanced endoreduplication at the site of powdery mildew infection which is known to correlate with enhanced powdery mildew asexual reproduction. Together, these results support a role for OEC60/OEC61 in limiting TCP13/14 function to promote endoreduplication at the infection site. To further elucidate this interaction node, proteomic analysis (2-D LC MS/MS) of the MYC-purified protein complex from G. orontii-infected and uninfected plants expressing G. orontii MGH1 OEC60/OEC61-MYC was performed. TCP13 and TCP14 protein interactions suggest OEC60/OEC61 interacts with TCP13 and TCP14 to alter gene expression associated with endoreduplication including endocycle reentry, inhibition of cell division and cytokinesis, and endocycle progression. Manipulation of the endocycle is important for the proliferation of powdery mildew and the growth and development of diverse biotrophs. These findings provide fundamental insights on regulation of the eukaryotic cell cycle.

### Introduction

[0952] Plant TCP transcription factors regulate growth and development (Lopez et al., 2015). The TCP gene family is named after the first 3 genes identified in this family: TEOSINTE BRANCHED1 in maize (Zea mays), CYCLOIDEA in snapdragon (Antirrhinum majus), and PCF (proliferating cell nuclear antigen factor) in rice (Oryza sativa) (Lopez et al., 2015). TCPs emerged 650-800 million years ago, predating land plants, and have been identified in moss and algae in addition to angiosperms which are more well studied (Navaud et al., 2007). Arabidopsis thaliana has 24 TCPs containing the 59 amino acid TCP domain (basic helix-loop-helix domain) which mediates DNA-binding (Lopez et al., 2015). TCPs are divided into two classes; class I TCPs are known to promote cell proliferation and class II TCPs act antagonistically to suppress growth (Li, 2015). They are highly interactive proteins within and outside their protein family (BioGRID; Stark et al., 2006). They interact within their protein family to form homo- and hetero-dimers which controls affinity and specificity in DNA-binding (Li, 2015). Together these transcription factors act redundantly and antagonistically to regulate leaf development, plant hormone biosynthesis, and plant immunity (Lopez et al., 2015). This regulation may be critical in balancing growth when stressed to protect the fitness of the plant.

[0953] TCPs are emerging as plant pathogen immunity modulators heavily acted upon by secreted pathogen effectors from diverse pathogens. In a yeast-two hybrid screen performed by (WeBling et al., 2014), effectors from Hyaloperonospora arabidopsidis (downy mildew, oomycete), Pseudomonas syringae DC3000 (bacterium), and Golovinomyces orontii MPIPZ (powdery mildew fungus) were screened against a library of A. thaliana proteins. Among 9 proteins that were targeted by effectors from all three pathogens, 3 of them were TCPs (TCP13, TCP14, and TCP15). TCP14 was the most highly targeted host protein with 52 effectors targeting it, primarily effectors from the obligate biotrophic pathogens downy and powdery mildews (WeBling et al., 2014). Furthermore, tcp13 and tcp14 mutants challenged by P. syringae DC3000 had opposite susceptibility phenotypes compared with challenge by obligate biotrophs (WeBling et al., 2014). Together this suggests TCPs function in lifestyle specific manners to impact plant immunity and/or pathogen virulence.

[0954] Within the 42 G. orontii MPIPZ effector candidate (OEC)-TCP interactions, several effectors were found to interact with multiple TCPs by yeast two-hybrid and all 5 targeted TCPs interacted with multiple effectors (WeBling et al., 2014). This represents 34% of all A. thaliana protein-OEC interactions. Suffice to say, there is much to uncover about the mechanism and function of these interactions. In this study we measure the genetic contribution of TCPs and OECs in the context of powdery mildew infection utilizing the G. orontii MGH1-Arabidopsis thaliana pathosystem.

[0955] Homologs of OECs in the related strain G. orontii MGH1 were identified for investigation in the annotated G. orontii MGH1 v4.0 genome accessed through MycoCosm (Grigoriev et al., 2014).

[0956] Spray-induced gene silencing is used to rapidly assess the contribution of OECs to powdery mildew spore production, prioritizing highly connected OECs that interact with TCPs that control powdery mildew susceptibility. Mutants in the five targeted TCP genes are also challenged with powdery mildew to identify novel TCP genes that contribute to spore production. The results of these disease assays along with bioinformatic analysis prioritizes G. orontii MGH1 homolog of OEC60 and OEC61 for further investigation.

[0957] The reproductive success of the powdery mildew fungus, G. orontii, is also tied to the ploidy state of the surrounding host tissues being co-opted to provide nutrients. Enhanced endoreduplication, or DNA replication without cell division, is observed in A. thaliana mesophyll cells underlying the infection site (Chandran et al., 2010). Additionally, several A. thaliana mutants with reduced or abrogated endoreduplication at the site of infection support less growth of the powdery mildew, with the extent of powdery mildew asexual reproduction highly correlated with infection site plant cell DNA ploidy levels (Chandran et al., 2013). Endoreduplication is proposed to increase the cells ability to provide energy rich metabolites to the powdery mildew during the metabolically demanding process of spore formation. It may also be associated with a metabolic shift from a source tissue to a sink tissue. TCPs, particularly class I TCPs, have many described roles in regulating the cell cycle. Powdery mildew infection assays are performed on four class I tcp mutants: tcp9, 14, 15, and tcp20. Of the 5 TCPs targeted by effectors, TCP14 and TCP15 have the most well described role in regulating endoreduplication (Peng et al., 2015). TCP14 and TCP15 redundantly suppress endoreduplication; single mutants have wildtype ploidy but double mutants have enhanced ploidy. DA1, DAR1, and DAR2 modulate the stability of TCP14 and TCP15 which represses the gene expression of RBR and CYCA3;2 among others whose expression promotes endoreduplication (Peng et al., 2015). Effectors targeting these TCPs could interfere with TCP mediated suppression of these genes. TCP20 is also a known regulator of the cell cycle and binds the CYCB1;1 promoter to regulate G2/M transition (Gutie et al., 2005) and TCP13, a class II TCP, suppresses cell expansion via suppression of ATHB12 expression (Hur et al., 2019). ATHB12 promotes expression of EXPANSIN (EXPA) a regulator of leaf expansion and CELL-CYCLE SWITCH 52A (CCS52A), an activator of the anaphase-promoting complex/cyclosome that promotes endoreduplication and has been implicated in biotroph-induced plant cell endoreduplication (Vercruysse et al., 2020; Wildermuth et al., 2017). The prevalence of effectors acting upon TCP nodes regulating growth and immunity indicates the import and complexity of their role in plant-pathogen interactions. Herein we provide evidence for a model by which powdery mildew effectors act on the TCP13-TCP14 node to promote localized host cell endoreduplication.

### Results

G. orontii Effectors Converge on A. Thaliana TCP Transcription Factors

[0958] G. orontii MGH1 effector homologs of G. orontii MPIPZ effector candidates (OECs) that interact with A. thaliana TCPs via yeast 2-hybrid (WeBling et al., 2014) were identified using G. orontii MGH1 v4.0 genome (See Methods) accessed through MyCocosm (Grigoriev et al., 2014). The TCP-OEC interaction map (FIG. 10, panel a) contains all G. orontii MPIPZ effectors identified in G. orontii MGH1 and their interacting TCPs (WeBling et al., 2014). Some OECs of interest have distinct OEC names but are homologs. When naming OEC homologs in G, orontii MGH1, OEC names are grouped together to indicate the homologs identified are related to multiple OECs (Table 6). For example, OEC60 and OEC61 are homologs. In G. orontii MGH1, two homologs were identified and are referred to as homologs of OEC60/OEC61. The OEC60/OEC61 G. orontii MGH1 homologs of OEC60/OEC61 also contain a large glycosyl hydrolase family 17 (GH17) domain belonging to the enzyme class 3.2.1.58 (EC 3.2.1.58). OEC60/OEC61 homologs in other powdery mildews also include the GH17 domain; therefore, G. orontii MPIPZ OEC60 and OEC61 homologs may be missing this domain due to the incomplete nature of the G. orontii MPIPZ genome sequence (Spanu et al., 2010).

TABLE 6
G. orontii TCP-targeting effectors selected for spray-induced gene silencing.

| | | | G. orontii MPIPZ | |
|---|---|---|---|---|
| | | | OEC-TCP | |
| | Copy | | interactions identified | OEC homologs in other |
| Effector | number¹ | Annotation^{1,2} | via yeast-two hybrid² | species^{1,3} |
| OEC14 | 2 | RNAse-like | TCP20 | Powdery mildews including |
| | | effector, nuclear | | G. cichoracearum, E. pisi, E. |
| | | localization | | necator |
| | | signal (RIKRR) | | |
| OEC21 | 2 | RNAse-like | TCP14, TCP15, | Powdery mildews including |
| | | effector | TCP20, HB21, CSN5A | G. cichoracearum, E. pisi |
| OEC27/ | 7 | RNAse-like | TCP9, TCP14, TCP15 | Powdery mildews including |
| OEC39 | | effector | | G. cichoracearum |
| OEC59/ | 2 | | TCP20, TPR8 | Powdery mildews including |
| OEC68 | | | | G. cichoracearum, E. pisi, E. |
| | | | | necator |
| OEC60/ | 2 | glycosyl | TCP13, TCP14, | Powdery mildews including |
| OEC61 | | hydrolase | CSN5A, SBP | G. cichoracearum, E. |
| | | family 17 | | necator, E. pisi, B. graminis |
| | | (GH17) | | f. sp. hordei, and B. graminis |
| | | | | f. sp. triticum (BEC1005); |
| | | | | Other fungal pathogens, |
| | | | | GH17 domain-containing |
| | | | | proteins are widely present |
| | | | | and secreted in fungi |
| | | | | however the region upstream |
| | | | | of the GH17 domain |
| | | | | (containing G. orontii |
| | | | | MPIPZ OEC60 or OEC61 |
| | | | | sequence) has only been |
| | | | | identified in powdery |
| | | | | mildews |
| OEC70 | 2 | | TCP9, TCP14, CSN5A, | Powdery mildews including |
| | | | ASIL1, RCN1, UBQ- | G. cichoracearum, E. pisi, E. |
| | | | like gene | necator |
| OEC119 | 2 | | TCP14, TCP20, RCN1, | Powdery mildews including |
| | | | PP2AA2 | G. cichoracearum |

¹G. orontii MGH1 genome accessed through MycoCosm (Grigoriev et al., 2014).
²(Bernhofer et al., 2018) (Weβling et al., 2014).

A. Thaliana Tcp13, Tcp14, Tcp15, and Tcp20 have Enhanced Susceptibility to G. orontii MGH1

[0959] Of the five TCPs found to interact with G. orontii MPIPZ effectors via yeast 2-hybrid (FIG. 10, panel a; Table 7; WeBling et al., 2014), A. thaliana T-DNA insertion mutants in three exhibited a powdery mildew phenotype in seedling assays. tcp13, tcp14, and tcp15 exhibited enhanced disease susceptibility (eds) to G. orontii MPIPZ. However, only tcp13 and tcp14 exhibited eds using adult plants (WeBling et al., 2014), the focus of our study.

TABLE 7
TCP transcription factor gene information and targeting effectors.

| Arabidopsis | Gene | |
|---|---|---|
| thaliana TCP¹ | Locus | |
| TCP9 (Class I) | AT2G45680 | OEC27, OEC39, OEC49, OEC70, |
| | | OEC76 |
| TCP13 (Class II) | AT3G02150 | OEC45, OEC61 |
| TCP14 (Class I) | ATCG47620 | OEC16a, OEC21, OEC27, OEC35, |
| | | OEC39, OEC45, OEC55, OEC60, |
| | | OEC70, OEC101, OEC110, OEC117, |
| | | OEC119, OEC120, OEC123, OEC125 |
| TCP15 (Class I) | AT1G69690 | OEC21, OEC39 |
| TCP20 (Class I) | AT3G27010 | OEC14, , OEC21, OEC68, OEC77, |
| | | OEC119 |

¹(Lopez et al., 2015).
²(Weβling et al., 2014).

[0960] Using a modified spore quantification protocol developed for G. orontii MGH1 (WeBling et al., 2014), powdery mildew disease was quantified on tcp9, tcp13, tcp14, tcp15, and tcp20 adult plants compared with wild type plants (FIG. 10, panels b-c). A. thaliana tcp13, tcp14, tcp15, and tcp20 have enhanced susceptibility to G. orontii MGH1 (FIG. 10, panel c), meaning they support higher fungal proliferation. tcp15 exhibits the smallest statistically significant increase in powdery mildew spore production of the tested TCPs, with 24% more spores formed per gram fresh weight on average than wild type plants. This suggests our assay is able to resolve small differences in powdery mildew disease not previously identified. tcp13 and 14 exhibit similar increases in spore production of 48% and 39%, respectively, compared to wild type plants, and the previously untested tcp20 mutant allows the greatest increase in spore production (56%).

G. orontii MGH1 Effector Homologs OEC14, OEC60/OEC61, and OEC70 Contribute to Spore Production

[0961] OEC homologs in G. orontii MGH1 were selected for spray-induced silencing assays (SIGS) based on their ability to target multiple TCPs (FIG. 10, panels a-b) or target TCPs that contribute to spore production (FIG. 10, panel c). For each of the seven OEC homologs tested, a single long dsRNA was designed and synthesized for SIGS in A. thaliana whole plant powdery mildew disease assays. As a control, we show the reduction in spore production with SIGS against the known azole-fungicide target, CYP51 (FIG. 10, panel d), a gene required for membrane synthesis (Zhang et al., 2019). SIGS targeting G. orontii MGH1 homologs of OEC14, OEC60/OEC61, and OEC70 significantly reduced spore production in G. orontii MGH1 infection of A. thaliana compared to buffer only controls (FIG. 10, panel d).

[0962] All OECs were originally identified based on their secretion signal and not having homology outside powdery mildews (WeBling et al., 2014), among other criteria. As such the effectors silenced are specific to powdery mildews except for the glycosyl hydrolase family 17 (GH17) domain-containing protein G. orontii MGH1 OEC60/OEC61. The GH17 protein domain has been identified in plants and fungi (Gaudioso-Pedraza and Benitez-Alfonso, 2014). Among other fungi accessed via MycoCosm, we found GH17 domain-containing proteins to be often secreted and have multiple copies (Grigoriev et al., 2014). The predicted protein structure of G. orontii MGH1 OEC60/OEC61 is similar to a glycoside hydrolase family 17 beta-1,3-glucanosyltransferase in Rhizomucor miehei (FIG. 11). Furthermore, it contains the catalytic amino acid identified in barley P-glucan endohydrolases that is also present in Saccharomyces cerevisiae (Chen et al., 1993).

### Spray-Induced Gene Silencing of Homolog of OEC60OEC61 in Erysiphe Necator Reduces Grape Powdery Mildew Spore Production

[0963] As the full G. orontii MGH1 OEC60/OEC61 is conserved in other powdery mildews (Table 6) and has the potential to interact with both TCP13 and TCP14, we tested whether findings in the G. orontii MGH1-Arabidopsis pathosystem can translate to an agriculturally important pathosystem, powdery mildew of grapevine. To do so, we identified an OEC60/OEC61 homolog in E. necator c (Jones et al., 2014) and designed a long dsRNA to target this gene in the same region effective for G. orontii. Targeting of OEC60/OEC61 in Erysiphe necator by SIGS reduces grape powdery mildew production on V. vinifera leaves to 71% of control treated plants (FIG. 12), similar to the reduction seen with the Arabidopsis powdery mildew (FIG. 10, panel d).

G. orontii MGH1 OEC60/OEC61 is Nuclear-Targeted Effector that Colocalizes and Interacts with with TCP13

[0964] Agrobacterium-mediated transient expression experiments were performed in Nicotiana benthamiana to investigate the localization of G. orontii MGH1 homolog of OEC60/OEC61. OEC60/OEC61-CFP was strongly localized to the nucleus of plant cells (FIG. 13). Co-infiltrations experiments showed OEC60/OEC61-CFP colocalized in the nucleus with YFP-TCP13 (FIG. 13). Subnuclear foci could not be resolved to indicate specific co-localization of YFP-TCP13 and OEC60/OEC61-CFP. Although TCPs are transcription factors known to localize to the nucleus, TCP13 was found to primarily localize to chloroplasts in tobacco plants and to function as a regulator of chloroplast encoded genes like psbD (Baba et al., 2001). Co-localization should be further explored in mesophyll cells where chloroplasts are prevalent and in response to infection, which could alter localization. Additional co-infiltrations were performed to confirm a physical biochemical interaction in planta via co-immunoprecipitation (co-IP). A western blot shows YFP-TCP13 and OEC60/OEC61-3×HA interact in planta (FIG. 14). G. orontii MPIPZ OEC60 was previously shown to co-localize in sub-nuclear foci and interact in planta, confirmed by co-IP, with TCP14 (WeBling et al., 2014). In addition, TCP13 and TCP14 have been found to interact with each other via yeast-two hybrid (Danisman et al., 2013; Dreze et al., 2011) suggesting they could both function in the nucleus.

Transgenic A. Thaliana Expressing G. orontii MGH1 OEC60/OEC61-MYC Created to Identify Protein Interaction Network

[0965] To identify novel protein interactions with G. orontii MGH1 OEC60/OEC61, we transformed A. thaliana pGWB17-OEC60/OEOC61. pGWB17 contains a T-DNA that expresses genes of interest constitutively under the control of the CaMV35s and adds a C-terminal MYC epitope. Transformants do not have any noticeable or severed developmental phenotype. Using stable transgenic lines, we performed co-IP of OEC60/OEC61 from the host plant in uninfected and powdery mildew-infected leaf tissue. Multiple proteins were detected in infected and uninfected MYC co-immunoprecipitation (co-IP) protein purifications by Coomassie staining of protein run on an SDS-PAGE gel cut and sent for proteomic analysis (2-D LC MS/MS). Identified protein are in Table 8. SIGS against one of these targets, G. orontii APC1 involved in cell fate modulation was tested and resulted in 48% reduction in spore production.

TABLE 8
G. orontii MGH1 protein identified mass spectrometry from
co-immunoprecipitation of OEC60/OEC61-MYC from infected transgenic
A. thaliana. 2D (MudPIT) cation exchange/RP LC-MS/MS analysis
was performed with reference to the G. orontii MGH1 (Golor4) JGI
database “Mycocosm” //mycocosm.jgi.doe.gov/Golor4/Golor4.home.html).
Proteins identified in wildtype A. thaliana co-IP were excluded
from A. thaliana 35S::OEC60/61-MYC transgenic co-IP proteins
identified.

| | | Putative | | Protein | |
|---|---|---|---|---|---|
| | Gene Name or PFAM | Gene | | ID | Copy |
| Process | Domain | Symbol | EC ID | (Golor4) | Number |
| Cell fate | Anaphase-promoting | APC1 | | 5334394 | 3 |
| modulation | complex/20S cyclosome | | | | |
| | subunit | | | | |
| Mitochrondrial | Mitochondrial carrier (MC) | | | 4771748 | 4 |
| ADP/ATP | protein | | | | |
| transporter | | | | | |
| RNA | RNA recognition motif | | | 4204905 | 2 |
| | (RRM) containing protein | | | | |
| PPP pathway | 6-phosphogluconate | PGD | 1.1.1.44 | 549579 | 2 |
| | dehydrogenase | | | | |
| Amino acid | Glycine | SHMT | 2.1.2.1 | 1010163 | 4 |
| metabolism, | hydroxymethyltransferase/ | | | | |
| cofactor | serine aldolase/serine | | | | |
| metabolism | hydroxymethyltransferase | | | | |

### Discussion

[0966] TCPs and their targeting effectors are important modulators of susceptibility in A. thaliana-G. ororntii interactions. Our findings suggest these interactions promote infection site reprogramming to support powdery mildew proliferation. The adapted spore quantification assay and ploidy determination experiments proved to be quite sensitive to resolve the impact of single cell cycle component genes and effectors despite the prevalence of redundancy. The tcp14 mutant, for example, supported more powdery mildew growth and had enhanced ploidy at the site of infection (FIG. 10 panel c) despite being functionally redundant in developmentally-associated ploidy. tcp14 and tcp15 single mutants do not impact ploidy in leaves, but double mutants have enhanced ploidy (Peng et al., 2015). Similarly, a single mutant in MYB3R4 was abrogated in powdery mildew-induced ploidy and supported less powdery mildew asexual reproduction whereas a double mutant was required to observe a leaf ploidy phenotype (Chandran et al., 2010). These findings highlight the ability of the powdery mildew system to identify individual components of the complex cell machinery governing cell fate.

[0967] TCP15, TCP20, OEC14, OEC60/OEC61, and OEC70 were identified as novel targets regulating powdery mildew asexual reproduction in adult plants. Interestingly, most of the TCPs investigated here are not upregulated at the site of infection (Chandran et al., 2013). This suggests effector-targeted TCPs are modulated at the protein level—and not transcriptionally. This is supported by the finding that the yeast 2-hybrid screen of G. orontii MPIPZ OEC60/OEC61 and OEC70 identified eight interacting Arabidopsis proteins in total, including three TCPs as shown in FIG. 10, panel a, and three proteins involved in protein modification (CSN5A, RCN1, and UBQ-like) (WeBling et al., 2014).

[0968] Prioritizing effectors targeting TCPs via SIGS has been extremely fruitful with 43% of targets contributing to spore production. Furthermore, those that did not have a phenotype via SIGS could be tested with long dsRNAs or siRNAs designed against different regions of the transcript or in combination with another dsRNA against a similarly interacting OEC. G. orontii MGH1 homologs of ten other OEC proteins that interact with TCPs by yeast 2-hybrid remain to be tested (FIG. 10 panel a). Three additional untested OECs belong to the same subclade (OEC16a, OEC123, and OEC125) and encode RNAse-like effectors. There are 12 copies of OEC16a/OEC123/0EC125 homologs in G. orontii MGH1 and 5 copies in the closely related powdery mildew G. cichoracearum (Grigoriev et al., 2014).

[0969] G. orontii MGH1 OEC70 which did contribute to spore production (FIG. 10 panel d) is very highly expressed (FIG. 15). As such, it may be an important conserved powdery mildew virulence factor. Future work will explore the role of OEC70 in the grape powdery mildew as was done with OEC60/OEC61. OEC14 which has a nuclear localization signal and is annotated as an RNAse-like effector (Table 6) also impacts spore production. Unlike the other effectors investigated, it only has one known target, TCP20. The impact of SIGS targeting OEC14 on grapevine powdery mildew proliferation will be assessed on its own and in combinations with OEC70 and/or OEC60/OEC61 targets.

[0970] OEC60/OEC61 emerged as an important effector in both the Arabidopsis and grapevine powdery mildew systems. Co-immunoprecipitation of this effector in planta can uncover additional protein interactions that influence this TCP 13-14 node. It can identify both host and pathogen effector proteins not originally included in the yeast-two hybrid screen (WeBling et al., 2014). Indeed, it identified five additional interacting G. orontii proteins (Table 8) including the cell fate modulator APC1 which when silenced resulted in 48% reduction in powdery mildew spore production. OEC60/OEC61 gene structure requires further investigation. The OEC60/OEC61 sequence that is responsible for TCP interaction via yeast 2-hybrid is completely independent of the GH17 domain, but both have implications in pathogenicity. In both plants and fungi, GH17 domain containing proteins are involved in immunity (Minic, 2008). One reported activity of this enzyme class is to break down callose which is deposited at plasmodesmata controlling the size exclusion limit of plasmodesmata and impacting pathogen susceptibility (Gaudioso-Pedraza and Benitez-Alfonso, 2014). However, the substrate of glycans can be hard to predict and would need to be experimentally validated. It is tempting to believe GH17 could be involved in post translational modification of TCPs. For example, TCP15 can be glycosylated to promote cytokinin responses (Steiner et al., 2016, 2012).

[0971] TCP13 and TCP14 are highly interactive proteins known to each target hundreds of proteins. These interactions modify their activity in regulating transcription. In the context of powdery mildew infection, these proteins are heavily targeted which may impact their protein and DNA binding capacities fine-tuning their role in this specific context. Several proteins that co-interact with both TCP13 and TCP14 are implicated in modulating the cell cycle. KNAT1 is highly expressed in hypocotyl tissue (Klepikova et al., 2016) which undergoes endoreduplication to support the growth of the plant before photosynthesis can take place (Jakoby and Schnittger, 2004). DA1 directly regulates endoreduplication by controlling the stability of TCP14 and TCP15 (Peng et al., 2015). CUC2 binds the DA1 promoter to promote its expression (Li et al., 2020). As our findings suggest, effectors could play a role in transiently modulating these interactions to guide TCP network outcomes. There are many examples of TCPs being targeted by pathogen effectors to promote infection. The P. syringae effector HopBB1 has been identified as a jasmonic acid (JA) regulator, facilitating the degradation of two negative regulators of JA, JAZ3 and TCP14, to promote virulence (Yang et al., 2017). Aster Yellows phytoplasma strain Witches' Broom (AY-WB) also encode effectors known to degrade TCPs. Specifically, effector SAP11 degrades class II sub group CIN-TCPs like TCP13 (Sugio et al., 2014). Expression of SAP11 in A. thaliana severely impacts development, phenocopying disease symptoms for which the disease is named after, Witches' Broom (Sugio et al., 2011). However, we found OEC60/OEC61 expression in plants does not lead to severe defects in plant development. SAP11 and OEC60/OEC61 are unrelated effectors originating in different domains of life but still converge on these TCP nodes.

### REFERENCES FOR EXAMPLE 2

[0972] Baba, K., Nakano, T., Yamagishi, K., Yoshida, S., 2001. Involvement of a nuclear-encoded basic helix-loop-helix protein in transcription of the light-responsive promoter of psbD. Plant Physiology 125, 595-603. https://doi.org/10.1104/pp. 125.2.595.
[0973] Bernhofer, M., Goldberg, T., Wolf, S., Ahmed, M., Zaugg, J., Boden, M., Rost, B., 2018. NLSdb-major update for database of nuclear localization signals and nuclear export signals. Nucleic Acids Research 46, D503-D508. https://doi.org/10.1093/nar/gkx1021.
[0974] Chandran, D., Inada, N., Hather, G., Kleindt, C. K., Wildermuth, M. C., 2010. Laser microdissection of Arabidopsis cells at the powdery mildew infection site reveals site-specific processes and regulators. Proceedings of the National Academy of Sciences of the United States of America 107, 460-465. https://doi.org/10.1073/pnas.0912492107.
[0975] Chandran, D., Rickert, J., Cherk, C., Dotson, B. R., Wildermuth, M. C., 2013. Host Cell Ploidy Underlying the Fungal Feeding Site Is a Determinant of Powdery Mildew Growth and Reproduction. Molecular Plant-Microbe Interactions 26, 537-545. doi.org/10.1094/MPMI-10-12-0254-R.
[0976] Chandran, D., Wildermuth, M. C., 2016. Modulation of Host Endocycle During Plant-Biotroph Interactions, Enzymes. https://doi.org/10.1016/bs.enz.2016.09.001.
[0977] Chen, L., Fincher, G. B., Hoj, P. B., 1993. Evolution of polysaccharide hydrolase substrate specificity. Catalytic amino acids are conserved in barley 1,3-1,4- and 1,3-P-glucanases. Journal of Biological Chemistry 268, 13318-13326.
[0978] Clough, S. J., Bent, A. F., 1998. Floral dip: A simplified method for Agrobacterium-mediated transformation of Arabidopsis thaliana. Plant Journal 16,735-743. doi.org/10.1046/j.1365-313X.1998.00343.x.
[0979] Danisman, S., van Dijk, A. D. J., Bimbo, A., van der Wal, F., Hennig, L., de Folter, S., Angenent, G. C., Immink, R. G. H., 2013. Analysis of functional red undancies within the Arabidopsis TCP transcription factor family. Journal of Experimental Botany 64, 5673-5685. https://doi.org/10.1093/jxb/ert337.
[0980] Dreze, M., Carvunis, A.-R., Charloteaux, B., Galli, M., Pevzner, S. J., Tasan, M., Ahn, Y.-Y., Balumuri, P., Barabasi, A.-L., Bautista, V., Braun, P., Byrdsong, D., Chen, H., Chesnut, J. D., Cusick, M. E., Dangl, J. L., de los Reyes, C., Dricot, A., Duarte, M., Ecker, J. R., Fan, C., Gai, L., Gebreab, F., Ghoshal, G., Gilles, P., Gutierrez, B. J., Hao, T., Hill, D. E., Kim, C. J., Kim, R. C., Lurin, C., MacWilliams, A., Matrubutham, U., Milenkovic, T., Mirchandani, J., Monachello, D., Moore, J., Mukhtar, M. S., Olivares, E., Patnaik, S., Poulin, M. M., Przulj, N., Quan, R., Rabello, S., Ramaswamy, G., Reichert, P., Rietman, E. A., Rolland, T., Romero, V., Roth, F. P., Santhanam, B., Schmitz, R. J., Shinn, P., Spooner, W., Stein, J., Swamilingiah, G. M., Tam, S., Vandenhaute, J., Vidal, M., Waaijers, S., Ware, D., Weiner, E. M., Wu, S., Yazaki, J., 2011. Evidence for Network Evolution in an Arabidopsis Interactome Map. Science 333, 601-607. doi.org/10.1126/science.1203877.
[0981] Earley, K. W., Haag, J. R., Pontes, O., Opper, K., Juehne, T., Song, K., Pikaard, C. S., 2006. Gateway-compatible vectors for plant functional genomics and proteomics. Plant Journal 45, 616-629. doi.org/10.1111/j.1365-313X.2005.02617.x.
[0982] Gaudioso-Pedraza, R., Benitez-Alfonso, Y., 2014. A phylogenetic approach to study the origin and evolution of plasmodesmata-localized glycosyl hydrolases family 17. Frontiers in Plant Science 5, 1-14. doi.org/10.3389/fpls.2014.00212.
[0983] Grigoriev, I. v., Nikitin, R., Haridas, S., Kuo, A., Ohm, R., Otillar, R., Riley, R., Salamov, A., Zhao, X., Korzeniewski, F., Smirnova, T., Nordberg, H., Dubchak, I., Shabalov, I., 2014. MycoCosm portal: Gearing up for 1000 fungal genomes. Nucleic Acids Research 42, 699-704. doi.org/10.1093/nar/gkt1183.
[0984] Gutie, R. A., Doerner, P., Li, C., Colon-Carmona, A., Potuschak, T., 2005. Arabidopsis TCP20 links regulation of growth and cell division control pathways. Proceedings of the National Academy of Sciences of the United States of America 102, 12978-12983.
[0985] Hur, Y. S., Kim, J., Kim, S., Son, O., Kim, W. Y., Kim, G. T., Ohme-Takagi, M., Cheon, C. I., 2019. Identification of TCP13 as an upstream regulator of ATHB12 during leaf development. Genes 10. doi.org/10.3390/genes10090644.
[0986] Jakoby, M., Schnittger, A., 2004. Cell cycle and differentiation. Current Opinion in Plant Biology 7, 661-669. doi.org/10.1016/j.pbi.2004.09.015.
[0987] Jones, L., Riaz, S., Morales-Cruz, A., Amrine, K. C., McGuire, B., Gubler, W., Walker, M., Cantu, D., 2014. Adaptive genomic structural variation in the grape powdery mildew pathogen, Erysiphe necator. BMC Genomics 15, 1081. doi.org/10.1186/1471-2164-15-1081.
[0988] Klepikova, A. v., Kasianov, A. S., Gerasimov, E. S., Logacheva, M. D., Penin, A. A., 2016. A high resolution map of the Arabidopsis thaliana developmental transcriptome based on RNA-seq profiling. Plant Journal 88, 1058-1070. doi.org/10.1111/tpj.13312.
[0989] Koyama, T., Mitsuda, N., Seki, M., Shinozaki, K., Ohme-takagi, M., 2010. TCP Transcription Factors Regulate the Activities of ASYMMETRIC LEAVES1 and miR164, as Well as the Auxin Response, during Differentiation of Leaves in Arabidopsis 22, 3574-3588. doi.org/10.1105/tpc.110.075598.
[0990] Li, S., 2015. The Arabidopsis thaliana TCP transcription factors: A broadening horizon beyond development. Plant Signaling and Behavior 10, 1-12. doi.org/10.1080/15592324.2015.1044192.
[0991] Li, Yu, Xia, T., Gao, F., Li, Yunhai, 2020. Control of Plant Branching by the CUC2/CUC3-DA1—UBP15 Regulatory Module. The Plant Cell 32, 1919-1932. doi.org/10.1105/tpc.20.00012.
[0992] Lopez, J. A., Sun, Y., Blair, P. B., Mukhtar, M. S., 2015. TCP three-way handshake: linking developmental processes with plant immunity. Trends in Plant Science. doi.org/10.1016/j.tplants.2015.01.005.
[0993] Minic, Z., 2008. Physiological roles of plant glycoside hydrolases. Planta 227, 723-740. doi.org/10.1007/s00425-007-0668-y.
[0994] Navaud, O., Dabos, P., Carnus, E., Tremousaygue, D., Herve, C., 2007. TCP transcription factors predate the emergence of land plants. Journal of Molecular Evolution 65, 23-33. doi.org/10.1007/s00239-006-0174-z.
[0995] Peng, Y., Chen, L., Lu, Y., Wu, Y., Dumenil, J., Zhu, Z., 2015. The Ubiquitin Receptors DA1, DAR1, and DAR2 Redundantly Regulate Endoreduplication by Modulating the Stability of TCP14/15 in Arabidopsis 27, 649-662. doi.org/10.1105/tpc.114.132274.
[0996] Reuber, T. L., Plotnikova, J. M., Dewdney, J., Rogers, E. E., William Wood, B., Ausubel, F. M., 1998. Correlation of defense gene induction defects with powdery mildew susceptibility in Arabidopsis enhanced disease susceptibility mutants. Plant Journal 16, 473-485. doi.org/10.1046/j.1365-313X.1998.00319.x.
[0997] Spanu, P. D., Abbott, J. C., Amselem, J., Burgis, T. A., Soanes, D. M., Stuber, K., van Themaat, E. V. L., Brown, J. K. M., Butcher, S. A., Gurr, S. J., Lebrun, M. H., Ridout, C. J., Schulze-Lefert, P., Talbot, N. J., Ahmadinejad, N., Ametz, C., Barton, G. R., Benjdia, M., Bidzinski, P., Bindschedler, L. v., Both, M., Brewer, M. T., Cadle-Davidson, L., Cadle-Davidson, M. M., Collemare, J., Cramer, R., Frenkel, O., Godfrey, D., Harriman, J., Hoede, C., King, B. C., Klages, S., Kleemann, J., Knoll, D., Koti, P. S., Kreplak, J., Lopez-Ruiz, F. J., Lu, X., Maekawa, T., Mahanil, S., Micali, C., Milgroom, M. G., Montana, G., Noir, S., O'Connell, R. J., Oberhaensli, S., Parlange, F., Pedersen, C., Quesneville, H., Reinhardt, R., Rott, M., Sacristan, S., Schmidt, S. M., Schon, M., Skamnioti, P., Sommer, H., Stephens, A., Takahara, H., Thordal-Christensen, H., Vigouroux, M., WeBling, R., Wicker, T., Panstruga, R., 2010. Genome expansion and gene loss in powdery mildew fungi reveal tradeoffs in extreme parasitism. Science 330, 1543-1546. doi.org/10.1126/science.1194573.
[0998] Stark, C., Breitkreutz, B. J., Reguly, T., Boucher, L., Breitkreutz, A., Tyers, M., 2006. BioGRID: a general repository for interaction datasets. Nucleic acids research 34, 535-539. doi.org/10.1093/nar/gkj109.
[0999] Steiner, E., Efroni, I., Gopalraj, M., Saathoff, K., Tseng, T., Kieffer, M., Eshed, Y., Olszewski, N., Weiss, D., 2012. The Arabidopsis O-Linked N-Acetylglucosamine Transferase SPINDLY Interacts with Class I TCPs to Facilitate Cytokinin Responses in Leaves and Flowers 24, 96-108. doi.org/10.1105/tpc.111.093518.
[1000] Steiner, E., Livne, S., Kobinson-Katz, T., Tal, L., Pri-Tal, O., Mosquna, A., Tarkowska, D., Mueller, B., Tarkowski, P., Weiss, D., 2016. The putative O-linked N-acetylglucosamine transferase SPINDLY inhibits class I TCP proteolysis to promote sensitivity to cytokinin. Plant Physiology 171, 1485-1494. doi.org/10.1104/pp. 16.00343.
[1001] Sugio, A., Kingdom, H. N., MacLean, A. M., Grieve, V. M., Hogenhout, S. A., 2011. Phytoplasma protein effector SAP11 enhances insect vector reproduction by manipulating plant development and defense hormone biosynthesis. Proceedings of the National Academy of Sciences of the United States of America 108, 1-10. doi.org/10.1073/pnas.1105664108.
[1002] Sugio, A., Maclean, A. M., Hogenhout, S. A., 2014. The small phytoplasma virulence effector SAP11 contains distinct domains required for nuclear targeting and CIN-TCP binding and destabilization. New Phytologist 202, 838-848. doi.org/10.1111/nph.12721.
[1003] Tanaka, Y., Kimura, T., Hikino, K., Goto, S., Nishimura, M., Mano, S., Nakagaw, T., 2012. Gateway Vectors for Plant Genetic Engineering: Overview of Plant Vectors, Application for Bimolecular Fluorescence Complementation (BiFC) and Multigene Construction. Genetic Engineering—Basics, New Applications and Responsibilities. doi.org/10.5772/32009.
[1004] Vercruysse, J., Baekelandt, A., Gonzalez, N., Inze, D., 2020. Molecular networks regulating cell division during Arabidopsis leaf growth. Journal of Experimental Botany 71, 2365-2378. doi.org/10.1093/jxb/erz522.
[1005] Vlieghe, K., Boudolf, V., Beemster, G. T. S., Maes, S., Magyar, Z., Atanassova, A., de Almeida Engler, J., de Groodt, R., Inze, D., de Veylder, L., 2005. The DP-E2F-like Gene DEL1 Controls the Endocycle in Arabidopsis thaliana. Current Biology 15, 59-63. doi.org/10.1016/j.cub.2004.12.038.
[1006] W, D. A. C., Danisman, S., Wal, F. van der, Dhondt, S., Waites, R., Folter, S. de, Bimbo, A., Dijk, A. D. J. van, Muino, J. M., Cutri, L., Dornelas, M. C., Angenent, G. C., Immink, R. G. H., 2012. Arabidopsis Class I and Class II TCP Transcription Factors Regulate Jasmonic Acid Metabolism and Leaf 159, 1511-1523. doi.org/10.1104/pp. 112.200303.
[1007] Wang, S., Li, W., Liu, S., Xu, J., 2016. RaptorX-Property: a web server for protein structure property prediction. Nucleic acids research 44, W430-W435. doi.org/10.1093/nar/gkw306.
[1008] WeBling, R., Epple, P., Altmann, S., He, Y., Yang, L., Henz, S. R., McDonald, N., Wiley, K., Bader, K. C., GlaBer, C., Mukhtar, M. S., Haigis, S., Ghamsari, L., Stephens, A. E., Ecker, J. R., Vidal, M., Jones, J. D. G., Mayer, K. F. X., ver Loren Van Themaat, E., Weigel, D., Schulze-Lefert, P., Dangl, J. L., Panstruga, R., Braun, P., 2014. Convergent targeting of a common host protein-network by pathogen effectors from three kingdoms of life. Cell Host and Microbe 16, 364-375. doi.org/10.1016/j.chom.2014.08.004.
[1009] WeBling, R., Panstruga, R., 2012. Rapid quantification of plant-powdery mildew interactions by qPCR and conidiospore counts. Plant Methods 8, 35. doi.org/10.1186/1746-4811-8-35.
[1010] Wildermuth, M. C., 2010. Modulation of host nuclear ploidy: A common plant biotroph mechanism. Current Opinion in Plant Biology 13, 449-458. doi.org/10.1016/j.pbi.2010.05.005.
[1011] Wildermuth, M. C., Steinwand, M. A., McRae, A. G., Jaenisch, J., Chandran, D., 2017. Adapted Biotroph Manipulation of Plant Cell Ploidy. Annual Review of Phytopathology 55, 537-564. doi.org/10.1146/annurev-phyto-080516-035458.
[1012] Yang, L., Teixeira, P. J. P. L., Biswas, S., Finkel, O. M., He, Y., Salas-Gonzalez, I., English, M. E., Epple, P., Mieczkowski, P., Dangl, J. L., 2017. Pseudomonas syringae Type III Effector.
[1013] HopBB1 Promotes Host Transcriptional Repressor Degradation to Regulate Phytohormone Responses and Virulence. Cell Host and Microbe 21, 156-168. doi.org/10.1016/j.chom.2017.01.003.
[1014] Zhang, J., Li, L., Lv, Q., Yan, L., Wang, Y., Jiang, Y., 2019. The fungal CYP51s: Their functions, structures, related drug resistance, and inhibitors. Frontiers in Microbiology 10. doi.org/10.3389/fmicb.2019.00691.

### Example 3

Single Copy Genes in G. orontii MGH1 Following Recent Whole Genome Duplication.

[1015] Powdery mildew genomes are large and are full of transposable elements that makes it difficult to assemble and analyze (Spanu et al. 2010; Frantzeskakis et al., 2018; Wicker et al 2013). With the DOE Joint Genome Institute, Walnut Creek, CA, we have led sequencing of the genomes of several powdery mildew species using long read PacBio sequencing including isolates of G. orontii (Arabidopsis), G. cichoracearum (Cucurbits), P. neolycopersici (Tomato), E. pisi (Pea) and B. graminis fsp hordei (Barley). The genome of G. orontii MGH1 is one of the best assembled powdery mildew genomes to-date and includes HiC data in its assembly.

[1016] Powdery mildew genomes are haploid. However, the genome assembly of G. orontii MGH1 (Gor) indicates a whole genome duplication (WDG) event supported by the larger genome size, twice the number of genes as compared to other powdery mildew species, and large segmental duplications. Evolutionary analyses indicate that this is a recent event, and duplicated genes have more than 95% sequence similarity in duplicate gene pairs. Despite this nearly universal duplication of genes, a small set of genes are single copy in Gor, suggesting there was strong pressure to maintain these genes as single copy.

[1017] The polyploidization or whole genome duplication is a phenomenon that happens in nature and plays a critical role in evolution of species (Duarte et al. 2010, Tan et al. 2016). Although, the duplication events provide the additional genetic material that helps the species to diversify and evolve, it is critical for cells to maintain a gene dosage balance for some genes to maintain normal developmental processes. To maintain the gene dosage balance, duplicated genes can undergo different processes including maintaining the dosage dependent expression of genes, neo-functionalization, sub-functionalization or gene loss (Shi et al. 2015, Lloyd et al. 2014). Several studies analyzing genome evolution following the genome duplication events suggest that gene loss is not a random process and that specific functional classes of genes exist that are under strong selective pressures to return to single copy. Some of these genes are involved in cellular and developmental processes e.g., transcription and translation machinery, cell organization and biogenesis e.g., genes involved in meiotic cell division, and genes involved in organelle-nuclear communication (Lloyd et al. 2014, Ha et al. 2007, Sriswasdi et al. 2016).

[1018] We analyzed the G. orontii MGH1 genome to identify single copy genes, e.g., those that have lost the duplicated copy following the WGD (see, e.g., Table 9). There are >2500 single copy genes conserved in all powdery mildews except for G. orontii MGH1 which, due to WGD, now has two copies for most of these genes. However, for 213 genes, G. orontii MGH1 has lost one copy of the duplicated gene pair. Pfam domain analysis and Gene Ontology analysis of this gene set identified enriched functional categories that overlap with those previously observed (Lloyd et al. 2014, Ha et al. 2007, Sriswasdi et al. 2016.) and that are distinct. For example, genes involved in cellular and development processes including transcription and translation, genes involved in cell organization and biogenesis, e.g., cell cycle/cell division, and genes involved in vesicular and transport functions. In addition, genes playing metabolic roles, particularly in lipid metabolism, carbohydrate utilization, and amino acid and nucleotide metabolism were enriched. Finally, there were a number of single copy genes with unknown function. Single copy genes serve as ideal targets for SIGS as they tend to be essential genes, there is only one copy of the gene to be silenced, and chances of resistance development through increased copy number are dramatically reduced or absent. For metabolic genes, single copy genes are likely to represent highly regulated enzymes in a pathway or to produce a regulatory compound. For example, Gor BCDO encodes an NCED enzyme that serves as the rate-limiting enzyme in abscisic acid synthesis in plants and plays a critical regulatory function (Xiong and Zhu, 2003).

[1019] We have prioritized 57 of these single copy gene targets for initial target testing (Table 9, below). Sequences for the additional 156 single copy gene targets are provided (see, e.g., SEQ ID NOs:255-411). In Table 1, they are distributed in distinct process categories when their predicted function is known and in Category 4 (Essential Cellular Processes) when unknown. We have tested SIGS against 13 of these single copy gene targets, and 12 of 13 resulted in significant reduction in G. orontii growth and reproduction on Arabidopsis (see, e.g., Table 2 and Table 9). This results in a 92% success rate in the identification of successful target genes to-date. It also suggests that additional dsRNA sequences against the one target that showed no phenotype in disease reduction be tested to ensure the negative result is not merely the result of an inefficient dsRNA. E. necator orthologs of BCDO and APG9 have been tested in the E. necator-grapevine system and showed dramatic reduction (>50%) in powdery mildew growth and reproduction (Table 2). Furthermore, topical dsRNA against E. necator APG9 was effective in vineyard field trials at reducing powdery mildew disease (see Example 4).

[1020] For process categories already of particular interest (see Tables 1 and 3, supra), we prioritize the single copy genes to target. In addition, categories enriched for these single copy genes point us to new process categories of importance for target prioritization as well as genes with unknown function we may not have otherwise prioritized. While some of these genes are associated with enriched process categories for single copy genes in other systems, there are also distinct genes in our set, that may be shared with other plant biotrophs and particularly plant obligate biotrophs that share an evolved dependency on plant nutrients and metabolites.

TABLE 9
Illustrative genes that are single copy following WGD in G. orontii - by process
category. Bolded genes show reduction in powdery mildew growth & reproduction when
silenced. Of 13 single copy genes targets tested, 12 showed a SIGS pathogen reduction
phenotype. The two of these orthologous E. necator targets tested, also showed
reduction in powdery mildew growth and reproduction (flagged by “**”).

| | | | |
|---|---|---|---|
| SEQ | | | |
| ID NO | Gene Name/PFAM domain | Process category | Process subcategories |

Tested Gene Targets

| | | | |
|---|---|---|---|
| 15 | Transaldolase | Metabolism | Lipid metabolism |
| | | | PPP pathway |
| 54 | Fructose 1,6-BP aldolase | Metabolism | Carbohydrate Metabolism |
| | | | Glycolysis |
| 63 | Glutamate dehydrogenase | Metabolism | Amino Acid & nucleotide |
| | | | metabolism |
| | | | Amino |
| | | | metabolism/salvage |
| 64 | Threonine aldolase | Metabolism | Amino Acid & nucleotide |
| | | | metabolism |
| | | | Amino |
| | | | metabolism/salvage |
| 70 | pf02548~Ketopantoate | Metabolism | Amino Acid & nucleotide |
| | hydroxymethyltransferase | | metabolism |
| | | | Cofactor metabolism |
| 87 | pf08238~Sell repeat | Metabolism | Mitochondrial electron |
| | | | transport chain & ATP |
| | | | synthesis |
| | | | Mitochondrial |
| | | | electron transport |
| 104 | pf10453~Nuclear fragile X | Regulation | Protein regulation |
| | mental retardation- | | Translation |
| | interacting protein 1 | | |
| | (NUFIP1) | | |
| 145 ** | β-carotene 15,15′- | Manipulation of | Plant Hormone Metabolism |
| | dioxygenase (BCDO) | Plant Host | Abscisic acid |
| | | | (carotenoid) |
| 164 ** | pf04109~Autophagy protein | Essential Cellular | Vesicle, Autophagy, |
| | Apg9 | Processes | Phagocytosis |
| | | | Vesicle Formation |
| 167 | pf03517~Regulator of | Essential Cellular | Ion/Metal transport and |
| | volume decrease after | Processes | osmotic homeostasis |
| | cellular swelling | | Cell volume control |
| 169 | Ctr family Cu2+ | Essential Cellular | Ion/Metal transport and |
| | transporter | Processes | osmotic homeostasis |
| | | | Metal/ion transporter |
| 179 | NA | Essential Cellular | Unknown Function |
| | | Processes | |
| 180 | Cyclin-like protein | Essential Cellular | Cell cycle and DNA |
| | | Processes | replication |

Additional identified targets

| | | | |
|---|---|---|---|
| 40 | Acetyl-CoA transporter | Metabolism | Lipid Metabolism |
| | | | Acetyl CoA transport |
| 51 | pf01066~CDP-alcohol | Metabolism | Lipid metabolism |
| | phosphatidyltransferase | | Phospholipid synthesis |
| 58 | pf13418~Galactose oxidase, | Metabolism | Carbohydrate Metabolism |
| | central domain; | | Carbohydrate |
| | pf00651~BTB/POZ domain; | | utilization |
| | pf13854~Kelch motif; | | |
| | pf01344~Kelch motif | | |
| 59 | pf04321~RmlD substrate | Metabolism | Carbohydrate Metabolism |
| | binding domain | | Carbohydrate |
| | | | utilization |
| 60 | pf01256~Carbohydrate | Metabolism | Carbohydrate Metabolism |
| | kinase | | Carbohydrate |
| | | | utilization |
| 61 | Myo-inositol, sugar, and | Metabolism | Carbohydrate metabolism |
| | other transporter | | Metabolite transporter |
| 65 | serine o-acetyltransferase | Metabolism | Amino Acid & nucleotide |
| | | | metabolism |
| | | | cys/met metabolism |
| 66 | spermidine synthase | Metabolism | Amino Acid & nucleotide |
| | | | metabolism |
| | | | cys/met metabolism |
| 68 | Transmembrane AA | Metabolism | Amino Acid & nucleotide |
| | transporter | | metabolism |
| | | | Amino acid transport |
| 72 | pf02558~Ketopantoate | Metabolism | Amino Acid & nucleotide |
| | reductase PanE/ApbA; | | metabolism |
| | pf08546~Ketopantoate | | Cofactor metabolism |
| | reductase PanE/ApbA C | | |
| | terminal | | |
| 78 | pf02492~CobW/HypB/UreG, | Metabolism | Amino Acid & nucleotide |
| | nucleotide-binding domain; | | metabolism |
| | pf07683~Cobalamin | | Cofactor metabolism |
| | synthesis protein cobW C- | | |
| | terminal domain | | |
| 83 | pf00383~Cytidine and | Metabolism | Amino Acid & nucleotide |
| | deoxycytidylate deaminase | | metabolism |
| | zinc-binding region | | Nucleotide metabolism |
| 88 | pf05405~Mitochondrial ATP | Metabolism | Mitochondrial electron |
| | synthase B chain precursor | | transport chain & ATP |
| | (ATP-synt_B) | | synthesis |
| | | | ATP synthesis |
| 93 | BZip, AP1-like transcription | Regulation | Transcription regulation |
| | factor | | Stress response |
| 98 | fungal specific transcription | Regulation | Transcription regulation |
| | factor domain, Zn2Cys6 | | Development |
| | binuclear cluster domain | | |
| 99 | Brucentaur or craniofacial | Regulation | Transcription regulation |
| | development protein | | Development |
| 105 | pf01205~Uncharacterized | Regulation | Protein regulation |
| | protein family UPF0029; | | |
| | pf05773~RWD domain | | Translation |
| 106 | pf00642~Zinc finger C-x8-C- | Regulation | Protein regulation |
| | x5-C-x3-H type (and similar) | | Translation |
| 107 | pf10343~Potential | Regulation | Protein regulation |
| | Queuosine, Q, salvage | | Translation |
| | protein family | | |
| 108 | pf03914~CBF/Mak21 family | Regulation | Protein regulation |
| | | | Translation |
| 109 | pf01746~tRNA (Guanine-1)- | Regulation | Protein regulation |
| | methyltransferase | | Translation |
| 110 | pf13519~von Willebrand | Regulation | Protein regulation |
| | factor type A domain | | Protein turnover |
| 111 | pf02290~Signal recognition | Regulation | Protein regulation |
| | particle 14 kD protein | | Protein turnover |
| 112 | pf03810~Importin-beta N- | Regulation | Protein regulation |
| | terminal domain | | Protein turnover |
| 113 | pf00639~PPIC-type PPIASE | Regulation | Protein regulation |
| | domain; peptidyl prolyl | | Protein turnover |
| | isomerase | | |
| 154 | anthranilate synthase | Manipulation of | Plant Hormone Metabolism |
| | | Plant Host | Salicylic acid, auxin |
| | | | (chorismate) |
| 155 | pf00566~Rab-GTPase-TBC | Essential Cellular | Essential cellular processes |
| | domain | Processes | Cell cycle/DNA |
| | | | replication |
| 156 | pf10444~Nbl1/Borealin N | Essential Cellular | Essential cellular processes |
| | terminal | Processes | Cell cycle/DNA |
| | | | replication |
| 157 | pf06632~DNA double-strand | Essential Cellular | Essential cellular processes |
| | break repair and V(D)J | Processes | Cell cycle/DNA |
| | recombination protein | | replication |
| | XRCC4 | | |
| 158 | pf00515~Tetratricopeptide | Essential Cellular | Essential cellular processes |
| | repeat; pf07719~Tetratricopeptide | Processes | Cell cycle/DNA |
| | repeat; pf12895Anaphase- | | replication |
| | promoting complex, cyclosome, | | |
| | subunit3; pf13424~ | | |
| | Tetratricopeptide repeat | | |
| 159 | pf12720~Protein of unknown | Essential Cellular | Essential cellular processes |
| | function (DUF3807) | Processes | Cell cycle/DNA |
| | | | replication |
| 160 | pf00515~Tetratricopeptide | Essential Cellular | Essential cellular processes |
| | repeat; pf13414~TPR repeat | Processes | Cell cycle/DNA |
| | | | replication |
| 161 | pf00400~WD domain, G-beta | Essential Cellular | Essential cellular processes |
| | repeat | Processes | Cell cycle/DNA |
| | | | replication |
| 162 | pf13414~TPR repeat | Essential Cellular | Essential cellular processes |
| | | Processes | Cell cycle/DNA |
| | | | replication |
| 165 | pf04727~ELMO/CED-12 | Essential Cellular | Vesicle, Autophagy, |
| | family | Processes | Phagocytosis |
| | | | Phagocytosis |
| 166 | pf00789~UBX domain; | Essential Cellular | Vesicle, Autophagy, |
| | pf08059~SEP domain; | Processes | Phagocytosis |
| | pf14555~UBA-like domain | | Vesicle membrane |
| | | | fusion |
| 168 | CorA-like Mg2+ transporter | Essential Cellular | Ion/Metal transport and |
| | | Processes | osmotic homeostasis |
| | | | Metal/ion transporter |
| 170 | N/A | Essential Cellular | Unknown function |
| | | Processes | |
| 171 | N/A | Essential Cellular | Unknown function |
| | | Processes | |
| 172 | N/A | Essential Cellular | Unknown function |
| | | Processes | |
| 173 | N/A | Essential Cellular | Unknown function |
| | | Processes | |
| 174 | N/A | Essential Cellular | Unknown function |
| | | Processes | |
| 175 | N/A | Essential Cellular | Unknown function |
| | | Processes | |
| 176 | N/A | Essential Cellular | Unknown function |
| | | Processes | |
| 177 | N/A | Essential Cellular | Unknown function |
| | | Processes | |
| 178 | pf11937~Protein of unknown | Essential Cellular | Unknown function |
| | function (DUF3455) | Processes | |

### REFERENCES FOR EXAMPLE 3

[1021] Spanu P D, Abbott J C, Amselem J et al. Genome expansion and gene loss in powdery mildew fungi reveal tradeoffs in extreme parasitism. Science. 2010 Dec. 10; 330(6010); 1543-6. http://dx.doi.org/10.1126/science.1194573
[1022] Wicker T, Oberhaensli S, Parlange F, Buchmann J P, Shatalina M, Roffler S, et al. (2013). The wheat powdery mildew genome shows the unique evolution of an obligate biotroph. Nat. Genet. 45 1092-1096. http://dx.doi.org/10.1038/ng.2704
[1023] Frantzeskakis L, Kracher B, Kusch S, Yoshikawa-Maekawa M, Bauer S, Pedersen C, et al. Signatures of host specialization and a recent transposable element burst in the dynamic one-speed genome of the fungal barley powdery mildew pathogen. BMC Genomics. 2018; 19(1); 381. https://doi.org/10.1186/s12864-018-4750-6
[1024] Tan C, Pan Q, Cui C, Xiang Y, Ge X, Li Z. Genome-Wide Gene/Genome Dosage Imbalance Regulates Gene Expressions in Synthetic Brassica napus and Derivatives (AC, AAC, CCA, CCAA). Front Plant Sci. 2016 Sep. 23; 7:1432. doi: 10.3389/fpls.2016.01432.
[1025] Shi T, Rahmani R S, Gugger P F, Wang M, Li H, Zhang Y, Li Z, Wang Q, Van de Peer Y, Marchal K, Chen J. Distinct Expression and Methylation Patterns for Genes with Different Fates following a Single Whole-Genome Duplication in Flowering Plants. Mol Biol Evol. 2020 Aug. 1; 37(8); 2394-2413. doi: 10.1093/molbev/msaa105.
[1026] Lloyd A H, Ranoux M, Vautrin S, Glover N, Fourment J, Charif D, Choulet F, Lassalle G, Marande W, Tran J, Granier F, Pingault L, Remay A, Marquis C, Belcram H, Chalhoub B, Feuillet C, Berges H, Sourdille P, Jenczewski E. Meiotic gene evolution: can you teach a new dog new tricks?Mol Biol Evol. 2014 July; 31(7); 1724-7. doi: 10.1093/molbev/msu119.
[1027] Ha M, Li W H, Chen Z J. External factors accelerate expression divergence between duplicate genes. Trends Genet. 2007 April; 23(4); 162-6. doi: 10.1016/j.tig.2007.02.005.
[1028] Sriswasdi S, Takashima M, Manabe R, Ohkuma M, Sugita T, Iwasaki W. Global deceleration of gene evolution following recent genome hybridizations in fungi. Genome Res. 2016 August; 26(8); 1081-90. doi: 10.1101/gr.205948.116.

### Example 4

Topical dsRNA to Control Powdery Mildew in Vineyards

### Summary of Example 4

[1029] To assess the effect of topical dsRNA treatments to control powdery mildew in field conditions, we conducted vineyard field trials in the 2021 growing season at 2 different locations in California. Topical dsRNA treatment against five unique powdery mildew targets was tested and compared to untreated and/or gold standard chemical treatment controls. Berry disease incidence and severity, canopy development, berry development, and phytotoxicity were assessed at both sites. Berry chemistry analysis was performed for grapes harvested at one site. The topical spraying of dsRNA against all five gene targets (Seq ID Nos:182, 183, 186, 188, 208) tested in this trial dramatically reduced powdery mildew infection at both trial sites in California. Disease severity was kept at or below 5% and the dsRNA treatments exerted their inhibitory effects beyond 3 weeks. In addition, there was no negative impact of the dsRNA treatments on canopy or berry development, or evidence of phytotoxicity.

### Methods

[1030] The tests were done at Kearney Agriculture Research and Extension Center, Parlier, CA (Fresno County) and Armstrong Plant Pathology Field Station at University of California, Davis, CA. Susceptible grapevine cultivars were tested—Sauvignon Blanc at Kearney and Chenin Blanc at Davis. In both cases, the Stihl backpack sprayer SR450 was used and sprayer calibration, and normalization was performed to ensure equal doses of treatment applied to each replicate. During the trial period, vines were irrigated by drip irrigation and the regular maintenance of weeding, herbicide and insecticide treatments were done by the Kearney or Davis site field staff. In early season, 2.0 gallons/5 replicates and in mid to late season 2.5 to 3.0 gallons/5 replicates were sprayed. All appropriate personal protective equipment (PPE) was used and required training was completed including pesticide application training and heat exhaustion training. A randomized block design was used with 5 replicates for each treatment. Two adjacent vines were used as one experimental unit and the area between two trunks (yellow box) was sprayed and assessed (FIG. 16).

### Details of Field Site, Experimental Setup and Treatment Timings:

[1031] The trial was conducted at Kearney Agricultural Research and Extension Center, Parlier, CA on blocks of the susceptible white wine variety Sauvignon Blanc. Total of 5 different gene targets from grapevine powdery mildew E. necator, EnCYP51 (SEQ ID NO:182), EnLIP1 (SEQ ID NO:183), EnICL2 (SEQ ID NO:186), EnMS (SEQ ID NO:188) and EnAPG9 (SEQ ID NO:208) were tested at this site by backpack spraying of the experimental units with dsRNA designed specifically against these target genes. The treatments were placed in a randomized block design with 5 replicates of each (dsRNA treatments 1-5), 5 replicates of Gold Standard (GS) and 5 replicates of untreated control (UT Control). Gold Standard refers to the pesticides normally used by growers to control powdery mildew: Sulfur and other chemical fungicides such as Rally, Quintec, and Luna. Between each treatment replicate, consisting of two vines, there was a spacer vine to avoid the spray drift from one treatment another.

[1032] FIG. 17 provides an overview of the treatment schedule at Kearney. A total of 4 treatments of dsRNA were performed between May and July, replacing the 4 final treatments of the GS. Data were collected at the times marked by the gray dots in FIG. 17. The monitoring of powdery mildew index data and manual scouting of disease in the field was used to adjust timing schedule per standard protocol (www2.ipm.ucanr.edu/weather/grape-powdery-mildew-risk-assessment-index/?src=redirect2refresh).

### Data Collection and Analysis:

1. Disease Incidence (DI); Percent of Grape Bunches with Powdery Mildew.

[1033] The total number of bunches per replicate (mean of 130) and the bunches with powdery mildew growth were counted and percent of infected bunches per replicate was calculated. Assessment occurred at regular intervals from June 11 through July 23 (veraison) as shown in FIG. 18. The Disease Incidence analysis clearly shows the powdery mildew in the untreated control was significantly higher in comparison to dsRNA treated vines (FIG. 18, panel A) and not different statistically from the Gold Standard Control (FIG. 18, panel B). This indicates that the dsRNA mid-season treatment was effective in reducing powdery mildew disease and as effective as the Gold Standard it replaced (see FIG. 17).

### 2. Disease Severity: Percent of Infected Berries in a Bunch.

[1034] Disease severity was calculated by counting the number of infected berries compared to total berries in a bunch. 25 bunches from both sides of the canopy were assessed per replicate. As shown in FIG. 19, the disease severity for all dsRNA-treatments is well below 5%, is much reduced compared to the Untreated control (FIG. 19, panel A) and not statistically different from the gold standard treatment (FIG. 19, panel B).

### 3. Plant Characteristics: Canopy Size, Berry Development, Phytotoxicity

[1035] Canopy size visual estimation: The canopy size was visually estimated and a total of 6 readings from May 7th to July 9th were recorded. Canopy size was determined using a scale from 1 to 10 with 0.5 increments for each replicate, with 10 representing the largest canopy in the pool. Five replicates per treatment were assessed. There was no statistical difference between the canopy size growth over time in treated vs untreated vines suggesting that dsRNA treatment does not impact the canopy growth.

[1036] Phytotoxicity: Visual assessment occurred throughout the growing season and no visible signs of necrosis, aberrant leaf development, blistering, or leaf rollup were observed for any treatment. Note that minimal localized chlorosis was associated with powdery mildew infection sites.

[1037] Berry development: Qualitative visual assessment occurred throughout the growing season and no difference associated with a particular dsRNA treatment was noted compared with controls.

### 4. Berry Chemistry Analysis: Brix, pH and TA

[1038] Total of 10 bunches of approximately similar size and without obvious powdery mildew infection from each replicate (5 from each side of the canopy) were collected in the 3rd week of August. The berries were crushed, and the berry juice was cleared by centrifugation. 50 ml of clear berry juice was given to Dr. Qun Sun from Fresno State University for Brix, pH and TA analysis. There was no pattern of impact of dsRNA treatments on Brix, TA or pH. One TA (treatment 2) and one pH (treatment 3) showed a very slight difference compared to the untreated control, with p-values>0.01 (FIG. 20).

### Trial 2. Armstrong Plant Pathology Fieldhouse Facility, University of California Davis, CA

### Details of Field Site, Experimental Setup and Treatment Timings:

[1039] This trial was conducted at University of California Davis Plant Pathology Armstrong Facility on white wine variety Chenin Blanc. A total of 4 different gene targets from grapevine powdery mildew E. necator, EnLIP1 (Seq ID No:183), EnICL2 (Seq ID 186), EnMS (Seq ID No:188) and EnAPG9 (Seq ID No:208) were tested at this site by treating the vines with dsRNA designed against these target genes. A randomized block design with 5 replicates of each (treatments 1-5) and 5 replicates of untreated control (UT Control) was utilized. Spray protocols and spray volumes were the same as done by Akif Eskalen's team as shown on this link (Elfar et al. 2021, ucanr.edu/sites/eskalenlab/files/355630.pdf) and in Table 10. Eskalen's lab performed 3rd party commercial fungicide trials for the industry.

TABLE 10
Experimental overview - Armstrong site.

| | |
|---|---|
| Experimental design | Randomized complete block design with 4 replicates |
| Experimental unit | 2 adjacent vines = 1 experimental unit |
| Row and tree | 11 ft (row) and 7 ft (vine); Plot unit area 154 ft2 |
| spacing | |
| Area/treatment | 770 ft2 or 0.0176 acre/treatment (5 replicates = |
| | 1 treatment) |
| Volume water/Acre | 100 gallons/acre (April) = 1.76 gal/5 reps |
| | 150 gallons/acre (late May on) = 2.65 gal/5 reps |
| Equipment | Stihl SR 450 blower backpack sprayer |

Modified from Elfar et al. (2021) //ucanr.edu/sites/eskalenlab/files/355630.pdf

[1040] In this field trial, a total of 3 sprays of dsRNA were performed between May and early June (FIG. 21). For the dsRNA treatments, no parallel chemical treatments were performed prior to the dsRNA treatments. For the untreated control, no chemical treatments were employed. Because the dsRNA treatments ended June 2, one treatment of Luna experience, a commonly used chemical fungicide, was sprayed at the end of June for the dsRNA treatment vines. Gold standard treatment was performed as in FIG. 21 according to the powdery mildew index, best practices, and in parallel with Dr. Akif Eskalen (UC Davis) who was performing fungicide trials at an adjacent site. Data was collected at the times marked by gray dots in the FIG. 21, with all data collections following the final dsRNA treatment. The monitoring of powdery mildew index data and manual scouting of disease in the field was routinely done to plan the spray timing (www2.ipm.ucanr.edu/weather/grape-powdery-mildew-risk-assessment-index/?src=redirect2refresh).

### Data Collection and Analysis:

### Powdery Mildew Disease Incidence and Disease Severity:

[1041] Total of four Disease Incidence assessments and two Disease Severity assessments were performed (gray circles). No gold standard data was available for direct comparison due to differences in powdery mildew pressure between our vines and Akif Eskalen's vines adjacent to our plot. We also analyzed our treatment data for statistically significant patterns based on position in the field, but field position effects did not impact the findings within our sampled vines. The disease incidence and disease severity data was collected as described above for the Kearney site. Disease incidence was performed for all bunches per replicate unit, ranging from 22 to 86, average 55. For disease severity, 25 bunches were examined.

1. Powdery Mildew Disease Incidence (Percent of Berry Bunches with Powdery Mildew)

[1042] Disease incidence was assessed at 1 week, 2 weeks, 3 weeks, and >6 weeks following the last dsRNA treatment. Powdery mildew disease pressure at the Armstrong site was very high, with untreated samples exhibiting a disease incidence of ˜80% by June 23 (FIG. 22, panel A). The dsRNA treatments reduced powdery mildew disease incidence dramatically compared to the untreated control, with impact extending to 3 weeks after dsRNA treatments. LIP1, APG9, and MS showed the highest efficacy, with powdery mildew disease incidence of ˜20% at 3 weeks after the end of treatments, compared to ˜80% for untreated (June 23 data). Even more than six weeks after the dsRNA treatments, all dsRNA treatments exhibited a dramatic reduction in powdery mildew incidence compared to untreated controls, with APG9 performing best, with a mean disease incidence of 24% on July 16. Examining the slopes of the disease incidence progression for each treatment set (FIG. 22, panel B), shows the untreated control increases in average disease incidence 2.74-fold faster than that of dsRNA treatment for APG9, and ˜1.8-fold faster than the other three dsRNA treatments. Again, this supports continued efficacy of the dsRNA treatments, with APG9 exerting the strongest reduction on powdery mildew proliferation.

2. Powdery Mildew Disease Severity (Percent of Berries with Powdery Mildew Per Bunch)

[1043] All dsRNA treatments had dramatically reduced powdery mildew disease severity compared to the untreated control (FIG. 23, panel A). At almost 4 weeks post dsRNA treatment (June 28 sampling date), the dsRNA treatments effectively limited powdery mildew, with LIP1 and APG9 mean disease severity of 1% and ICL1 and MS mean disease severity of 2%, compared to 12% for untreated vines. And the dsRNA treatments continued to exert a strong influence on disease severity. Disease severity was kept at or below 5% through the July 16 sampling date (˜6 weeks after dsRNA treatments), compared to untreated control with ˜23% disease severity. Representative berry clusters, shown in FIG. 23B, reflect this difference.

### 3. Plant Characteristics: Canopy Size, Berry Development, Phytotoxicity

[1044] Canopy size: The canopy size was visually estimated using the 1-10 scale as above, with a total of 8 readings taken from May 5th to June 22^{nd}. Five replicates per treatment were assessed. There was no statistical difference between the canopy size growth over time in treated vs untreated vines suggesting that dsRNA treatment does not impact the canopy growth.

[1045] Phytotoxicity: Visual assessment occurred throughout the growing season and no visible signs of necrosis, aberrant leaf development, blistering, or leaf rollup were observed for any treatment. Note that minimal localized chlorosis was associated with powdery mildew infection sites.

[1046] Berry development: Qualitative visual assessment occurred throughout the growing season and no difference associated with a particular dsRNA treatment was noted compared with controls.

### Conclusion

[1047] In 2021, we tested the efficacy of selected gene targets to control powdery mildew of susceptible grapevine varietals at two field sites. The topical spraying of dsRNA against all five gene targets (SEQ ID Nos:182, 183, 186, 188, 208) tested in this trial dramatically reduced powdery mildew infection at both trial sites in California. Disease severity was kept at or below 5% and the dsRNA treatments exerted their inhibitory effects beyond 3 weeks. In addition, there was no negative impact of the dsRNA treatments on canopy or berry development, or evidence of phytotoxicity. The field tests were done according to best standard commercial practices in maintaining grapevine with treatments compatible with commercial spraying practices. Our results clearly show that the genes targeted using topical dsRNA to control Arabidopsis and grapevine powdery mildew in lab and greenhouse grape potted plants effectively controlled powdery mildew infection in the field. Three of the gene targets (Lip1 (triacylglycerol lipase), ICL1 (isocitrate lyase) and MS (malate synthase) of the glyoxylate cycle, are expected to function in lipid metabolism/acquisition process category. CYP51 is an essential enzyme involved in sterol biosynthesis, and a known powdery mildew fungicide target; therefore, our successful result with CYP51 confirms that topical dsRNA application can be used an effective alternate approach to inhibit known powdery mildew targets inhibited by chemical fungicides. The effectiveness of topical dsRNA against APG9 which functions in vesicle formation and autophagy highlights the importance of this process to powdery mildew proliferation.

[1048] These field tests were conducted with dsRNA dissolved in distilled water using our initially identified dsRNA sequences against a given target. Further optimization and modification of the dsRNA sequence against a given target coupled with optimized formulation and delivery systems would be expected to further increase treatment efficacy and its duration. This could allow for increased intervals between treatments, fewer treatments, and less dsRNA to be required. In addition, dsRNA sequences against multiple targets could be combined in one treatment or combined with other compatible plant growth promoters or pest inhibitors to potentially further increase efficacy.

### Example 5

Disease Reduction Data for Powdery Mildew Gene Targets for which dsRNA Treatment Results in Statistically Reduced Powdery Mildew Proliferation.

[1049] Table 11 below shows results for topical dsRNA treatment against powdery mildew in laboratory growth chamber/greenhouse and vineyard field trials in which the mean reduction in powdery mildew disease was statistically significant (p<=0.05) in G. orontii-Arabidopsis assays. Results for subsequent testing with topical dsRNA against these targets in E. necator-Vitis vinifera follows. Finally, field testing of topical dsRNA against E. necator targets at two vineyard sites is presented. Bolded and underlined targets exhibit >=50% reduction in powdery mildew disease assay in at least one assay. Targets labeled with “*” were tested in vineyards.

TABLE 11
Results for topical dsRNA treatment against powdery mildew in laboratory
growth chamber/greenhouse and vineyard field trials in which the
mean reduction in powdery mildew disease was statistically significant
(p <= 0.05) in G. orontii-Arabidopsis assays.

| | | | G. orontii Spore Production on Arabidopsis | | | |
|---|---|---|---|---|---|---|
| Gor | En | | Detached Leaf Assay | | Whole Plant Assay | |
| Seq | Seq | Gene name or PFAM | % | | % | |
| ID | ID | domain | reduction | p-value | reduction | p-value |
| 85 | 182* | Cytochrome P450 | 47% | 3.2E−06 | 46% | 1.7E−05 |
| | | monoxygenase 51 | | | | |
| | | (CYP51) | | | | |
| 1 | 183* | TAG Lipase 1, | 51% | 1.7E−04 | 22% | 2.1E−03 |
| | | carboxyesterase | | | | |
| 2 | 184 | TAG lipase A, | 67% | 6.6E−06 | 41% | 1.4E−02 |
| | | extracellular lipase | | | | |
| 15 | 185 | transaldolase | 38% | 5.6E−03 | | |
| 20 | 186* | isocitrate lyase(ICL) | 64% | 1.8E−03 | 37% | 1.8E−03 |
| | 187 | | | | | |
| 21 | 188* | malate synthase(MS) | 37% | 1.1E−03 | 22% | 1.6E−02 |
| 22 | 189 | Citrate (Si) synthase | 63% | 1.1E−02 | | |
| 32 | 190 | trans-2-enoyl CoA | 50% | 5.6E−05 | | |
| | | reductase | | | | |
| 63 | 191 | glutamate | 60% | 4.4E−03 | | |
| | | dehydrogenase | | | | |
| 64 | 192 | threonine aldolase | 55% | 7.5E−03 | | |
| 70 | 193 | pf02548~Ketopantoate | 46% | 1.8E−05 | | |
| | | hydroxymethyltransferase | | | | |
| 71 | 194 | tetrahydrofolate | 64% | 7.5E−05 | | |
| | | synthase | | | | |
| 79 | 195 | thymidylate synthase | 68% | 6.0E−05 | | |
| 87 | 196 | pf08238~Sel1 repeat | 42% | 9.4E−04 | | |
| 92 | 197 | apoptosis antagonizing | 44% | 6.0E−04 | 21% | 1.5E−01 |
| | | transcription factor | | | | |
| | | (AATF) | | | | |
| 104 | 198 | pf10453~Nuclear fragile | 39% | 1.8E−03 | | |
| | | X mental retardation- | | | | |
| | | interacting protein 1 | | | | |
| | | (NUFIP1) | | | | |
| 122 | 199 | G. orontii effector | | | 33% | 1.6E−04 |
| | | candidate 60/61 | | | | |
| 123 | 200 | G. orontii effector | 38% | 2.5E−03 | 32% | 4.5E−03 |
| | | candidate 70 | | | | |
| 124 | — | G. orontii effector | | | 33% | 1.0E−03 |
| | | candidate 14 | | | | |
| 140 | 201 | effector protein EC2 | 37% | 1.2E−02 | 60% | 1.4E−07 |
| 141 | 202 | Heat shock protein 70 | 76% | 4.5E−06 | | |
| | | family (HSP70) | | | | |
| 145 | 203 | β-carotene 15,15′- | 54% | 6.6E−03 | 50% | 2.7E−03 |
| | | dioxygenase(BCDO) | | | | |
| 146 | 204 | xanthoxin oxidase | 63% | 4.0E−03 | 42% | 1.6E−03 |
| 148 | 205 | ABA G-protein coupled | 54% | 6.2E−06 | 31% | 6.3E−05 |
| | | receptor | | | | |
| 149 | 206 | acyl-coA oxidase (ACX) | 42% | 5.0E−02 | 66% | 5.9E−04 |
| 163 | 207 | anaphase promoting | 48% | 7.6E−03 | | |
| | | complex/20S cyclosome | | | | |
| | | subunit | | | | |
| 164 | 208* | pf04109~Autophagy | 67% | 8.1E−04 | | |
| | | protein Apg9 | | | | |
| 167 | 209 | pf03517, Regulator of | 39% | 6.7E−02 | | |
| | | cell volume after cellular | | | | |
| | | swelling | | | | |
| 169 | 210 | Ctr family Cu2 + | 54% | 7.6E−05 | | |
| | | transporter | | | | |
| 179 | — | Single copy gene, | | | 41% | 1.3E−03 |
| | | unknown function | | | | |
| 180 | 211 | Cyclin-like protein | | | 53% | 1.2E−05 |
| 181 | — | Alanine-glyoxylate | 62% | 6.5E−03 | | |
| | | aminotransferase | | | | |
| | | | E. necator Spore Production on Grapevine | | | |
| Gor | En | | Leaf Disc Assay | | Whole Plant Assay | |
| Seq | Seq | Gene name or PFAM | % | | % | |
| ID | ID | domain | reduction | p-value | reduction | p-value |
| 85 | 182* | Cytochrome P450 | 45% | 3.6E−04 | 62% | 3.8E−03 |
| | | monoxygenase 51 | | | | |
| | | (CYP51) | | | | |
| 1 | 183* | TAG Lipase 1, | | | 64% | 6.4E−04 |
| | | carboxyesterase | | | | |
| 2 | 184 | TAG lipase A, | | | 62% | 5.6E−04 |
| | | extracellular lipase | | | | |
| 15 | 185 | transaldolase | | | | |
| 20 | 186*, | isocitrate lyase(ICL) | 57% | 3.3E−02 | 72% | 7.3E−04 |
| | 187 | | | | | |
| 21 | 188* | malate synthase(MS) | | | 28% | 3.4E−02 |
| 22 | 189 | Citrate (Si) synthase | | | | |
| 32 | 190 | trans-2-enoyl CoA | | | | |
| | | reductase | | | | |
| 63 | 191 | glutamate | | | | |
| | | dehydrogenase | | | | |
| 64 | 192 | threonine aldolase | | | | |
| 70 | 193 | pf02548~Ketopantoate | | | | |
| | | hydroxymethyltransferase | | | | |
| 71 | 194 | tetrahydrofolate | | | | |
| | | synthase | | | | |
| 79 | 195 | thymidylate synthase | | | | |
| 87 | 196 | pf08238~Sel1 repeat | | | | |
| 92 | 197 | apoptosis antagonizing | | | 53% | 8.9E−02 |
| | | transcription factor | | | | |
| | | (AATF) | | | | |
| 104 | 198 | pf10453~Nuclear fragile | | | | |
| | | X mental retardation- | | | | |
| | | interacting protein 1 | | | | |
| | | (NUFIP1) | | | | |
| 122 | 199 | G. orontii effector | 29% | 4.8E−02 | | |
| | | candidate 60/61 | | | | |
| 123 | 200 | G. orontii effector | 40% | 4.8E−02 | | |
| | | candidate 70 | | | | |
| 124 | — | G. orontii effector | | | | |
| | | candidate 14 | | | | |
| 140 | 201 | effector protein EC2 | 47% | 2.3E−05 | | |
| 141 | 202 | Heat shock protein 70 | | | | |
| | | family (HSP70) | | | | |
| 145 | 203 | β-carotene 15,15′- | | | 54% | 4.3E−02 |
| | | dioxygenase(BCDO) | | | | |
| 146 | 204 | xanthoxin oxidase | | | | |
| 148 | 205 | ABA G-protein coupled | | | | |
| | | receptor | | | | |
| 149 | 206 | acyl-coA oxidase (ACX) | | | | |
| 163 | 207 | anaphase promoting | | | | |
| | | complex/20S cyclosome | | | | |
| | | subunit | | | | |
| 164 | 208* | pf04109~Autophagy | | | | |
| | | protein Apg9 | | | | |
| 167 | 209 | pf03517, Regulator of | | | | |
| | | cell volume after cellular | | | | |
| | | swelling | | | | |
| 169 | 210 | Ctr family Cu2 + | | | | |
| | | transporter | | | | |
| 179 | — | Single copy gene, | | | | |
| | | unknown function | | | | |
| 180 | 211 | Cyclin-like protein | | | | |
| 181 | — | Alanine-glyoxylate | | | | |
| | | aminotransferase | | | | |
| | | | E. necator on Grapevine Berries | | | |
| | | | Vineyard Field Trials | | | |
| | | | Vineyard - Armstrong | | | |
| Gor | En | | Disease Severity | | Disease Incidence | |
| Seq | Seq | Gene name or PFAM | % | | % | |
| ID | ID | domain | reduction | p-value | reduction | p-value |
| 85 | 182* | Cytochrome P450 | | | | |
| | | monoxygenase 51 | | | | |
| | | (CYP51) | | | | |
| 1 | 183* | TAG Lipase 1, | 90% | 4.4E−03 | 97% | 1.0E−03 |
| | | carboxyesterase | | | | |
| 2 | 184 | TAG lipase A, | | | | |
| | | extracellular lipase | | | | |
| 15 | 185 | transaldolase | | | | |
| 20 | 186*, | isocitrate lyase(ICL) | 78% | 1.3E−02 | 93% | 2.0E−03 |
| | 187 | | | | | |
| 21 | 188* | malate synthase(MS) | 78% | 1.4E−02 | 98% | 1.0E−03 |
| 22 | 189 | Citrate (Si) synthase | | | | |
| 32 | 190 | trans-2-enoyl CoA | | | | |
| | | reductase | | | | |
| 63 | 191 | glutamate | | | | |
| | | dehydrogenase | | | | |
| 64 | 192 | threonine aldolase | | | | |
| 70 | 193 | pf02548~Ketopantoate | | | | |
| | | hydroxymethyltransferase | | | | |
| 71 | 194 | tetrahydrofolate | | | | |
| | | synthase | | | | |
| 79 | 195 | thymidylate synthase | | | | |
| 87 | 196 | pf08238~Sel1 repeat | | | | |
| 92 | 197 | apoptosis antagonizing | | | | |
| | | transcription factor | | | | |
| | | (AATF) | | | | |
| 104 | 198 | pf10453~Nuclear fragile | | | | |
| | | X mental retardation- | | | | |
| | | interacting protein 1 | | | | |
| | | (NUFIP1) | | | | |
| 122 | 199 | G. orontii effector | | | | |
| | | candidate 60/61 | | | | |
| 123 | 200 | G. orontii effector | | | | |
| | | candidate 70 | | | | |
| 124 | — | G. orontii effector | | | | |
| | | candidate 14 | | | | |
| 140 | 201 | effector protein EC2 | | | | |
| 141 | 202 | Heat shock protein 70 | | | | |
| | | family (HSP70) | | | | |
| 145 | 203 | β-carotene 15,15′- | | | | |
| | | dioxygenase(BCDO) | | | | |
| 146 | 204 | xanthoxin oxidase | | | | |
| 148 | 205 | ABA G-protein coupled | | | | |
| | | receptor | | | | |
| 149 | 206 | acyl-coA oxidase (ACX) | | | | |
| 163 | 207 | anaphase promoting | | | | |
| | | complex/20S cyclosome | | | | |
| | | subunit | | | | |
| 164 | 208* | pf04109~Autophagy | 87% | 5.4E−03 | 91% | 3.0E−03 |
| | | protein Apg9 | | | | |
| 167 | 209 | pf03517, Regulator of | | | | |
| | | cell volume after cellular | | | | |
| | | swelling | | | | |
| 169 | 210 | Ctr family Cu2 + | | | | |
| | | transporter | | | | |
| 179 | — | Single copy gene, | | | | |
| | | unknown function | | | | |
| 180 | 211 | Cyclin-like protein | | | | |
| 181 | — | Alanine-glyoxylate | | | | |
| | | aminotransferase | | | | |
| | | | E. necator on Grapevine Berries | | | |
| | | | Vineyard Field Trials | | | |
| | | | Vineyard - Kearney | | | |
| | | | | | Disease | |
| Gor | En | | Disease Severity | | Incidence | |
| Seq | Seq | Gene name or PFAM | % | | % | |
| ID | ID | domain | reduction | p-value | reduction | p-value |
| 85 | 182* | Cytochrome P450 | 93% | 2.5E−07 | 77% | 9.9E−04 |
| | | monoxygenase 51 | | | | |
| | | (CYP51) | | | | |
| 1 | 183* | TAG Lipase 1, | 71% | 7.1E−03 | 78% | 1.0E−03 |
| | | carboxyesterase | | | | |
| 2 | 184 | TAG lipase A, | | | | |
| | | extracellular lipase | | | | |
| 15 | 185 | transaldolase | | | | |
| 20 | 186*, | isocitrate lyase(ICL) | 94% | 4.9E−07 | 81% | 7.9E−04 |
| | 187 | | | | | |
| 21 | 188* | malate synthase(MS) | 87% | 8.1E−07 | 79% | 5.3E−04 |
| 22 | 189 | Citrate (Si) synthase | | | | |
| 32 | 190 | trans-2-enoyl CoA | | | | |
| | | reductase | | | | |
| 63 | 191 | glutamate | | | | |
| | | dehydrogenase | | | | |
| 64 | 192 | threonine aldolase | | | | |
| 70 | 193 | pf02548~Ketopantoate | | | | |
| | | hydroxymethyltransferase | | | | |
| 71 | 194 | tetrahydrofolate | | | | |
| | | synthase | | | | |
| 79 | 195 | thymidylate synthase | | | | |
| 87 | 196 | pf08238~Sel1 repeat | | | | |
| 92 | 197 | apoptosis antagonizing | | | | |
| | | transcription factor | | | | |
| | | (AATF) | | | | |
| 104 | 198 | pf10453~Nuclear fragile | | | | |
| | | X mental retardation- | | | | |
| | | interacting protein 1 | | | | |
| | | (NUFIP1) | | | | |
| 122 | 199 | G. orontii effector | | | | |
| | | candidate 60/61 | | | | |
| 123 | 200 | G. orontii effector | | | | |
| | | candidate 70 | | | | |
| 124 | — | G. orontii effector | | | | |
| | | candidate 14 | | | | |
| 140 | 201 | effector protein EC2 | | | | |
| 141 | 202 | Heat shock protein 70 | | | | |
| | | family (HSP70) | | | | |
| 145 | 203 | β-carotene 15,15′- | | | | |
| | | dioxygenase(BCDO) | | | | |
| 146 | 204 | xanthoxin oxidase | | | | |
| 148 | 205 | ABA G-protein coupled | | | | |
| | | receptor | | | | |
| 149 | 206 | acyl-coA oxidase (ACX) | | | | |
| 163 | 207 | anaphase promoting | | | | |
| | | complex/20S cyclosome | | | | |
| | | subunit | | | | |
| 164 | 208* | pf04109~Autophagy | 92% | 2.2E−07 | 81% | 7.6E−04 |
| | | protein Apg9 | | | | |
| 167 | 209 | pf03517, Regulator of | | | | |
| | | cell volume after cellular | | | | |
| | | swelling | | | | |
| 169 | 210 | Ctr family Cu2 + | | | | |
| | | transporter | | | | |
| 179 | — | Single copy gene, | | | | |
| | | unknown function | | | | |
| 180 | 211 | Cyclin-like protein | | | | |
| 181 | — | Alanine-glyoxylate | | | | |
| | | aminotransferase | | | | |

[1050] Bolded entries in Table 11 have 50% or greater reduction. Entries marked with a were tested in vineyard field trials (See Example 4 for details). n≥3 for the detached leaf/disc and whole plant assays (see Example 1). n=5 for the vineyard treatments (Example 4). The specific dsRNA employed against the targets are indicated in Table 2. These dsRNA sequences are illustrative, but non-limiting. Disease severity is the number of berries with powdery mildew/bunch (Armstrong and Kearney—July 16 sampling date). Disease incidence is the percent of berry bunches with evidence of powdery mildew out of total bunches (Armstrong sampling date 7 days post treatments (June 9); Kearney 7 days post treatments sampling date (July 16)). Example 4, supra, shows complete results from Vineyard field trials.

### Example 6

Illustrative Example of dsRNA Silencing of Gene Expression.

[1051] dsRNA targeting CYP51 reduces expression of CYP51 in G. orontii. A. thaliana was infected with G. orontii at day 0, followed by spraying with CYP51-targeting dsRNA. qPCR analysis was performed at 1, 3, and 5 days post infection. β-tubulin was used as a reference gene to normalize CYP51 expression between samples. Average CYP51 expression of dsRNA-sprayed tissue normalized to control CYP51 expression is plotted with n≥2 biological replicates, ±SEM. This illustrative example was performed as part of initial method development associated with Example 1.

[1052] It is understood that the examples and embodiments described herein are for illustrative purposes only and that various modifications or changes in light thereof will be suggested to persons skilled in the art and are to be included within the spirit and purview of this application and scope of the appended claims. All publications, patents, and patent applications cited herein are hereby incorporated by reference in their entirety for all purposes.

Lengthy table referenced here
US20260117244A1-20260430-T00001
Please refer to the end of the specification for access instructions.

LENGTHY TABLES
The patent application contains a lengthy table section. A copy of the table is available in electronic form from the USPTO web site (https://seqdata.uspto.gov/docdetail?docId=US20260117244A1). An electronic copy of the table will also be available from the USPTO upon request and payment of the fee set forth in 37 CFR 1.19(b)(3).

1. An isolated double stranded RNA (dsRNA) for controlling or preventing an infection of a plant by a phytopathogen, wherein said dsRNA is capable of inhibiting or downregulating (e.g., downregulates) expression of one or more target genes selected from the group consisting of a gene involved in lipid metabolism and/or acquisition, a gene involved in triacylglycerol (TAG)/glycerolipid metabolism, a gene involved in the pentose phosphate pathway (PPP), a gene involved in the tricarboxylic acid (TCA) and/or glyoxylate cycle, a gene involved in fatty acid synthesis and/or transport, a gene involved in lipid catabolism, a gene involved in fatty acid degradation including fatty acid B-oxidation, a gene involved in carbohydrate metabolism, a gene involved in glycogen metabolism, a gene involved in glycolysis, a gene involved in carbohydrate utilization, a gene involved in amino acid and/or nucleotide metabolism and salvage and/or cofactor metabolism, a gene involved in amino acid metabolism and/or salvage, a gene involved in cofactor metabolism, a gene involved in nucleotide metabolism and/or salvage, a gene involved in an essential fungal specific process, a gene involved in sterol biosynthesis, a gene involved in mitochondrial electron transport and/or A TP synthesis, a gene involved in mitochondrial electron transport chain, a gene involved in transcriptional regulation, a gene involved in protein regulation, a gene involved in nucleic acid translation, a gene involved in signaling, a gene involved in producing a secreted protein, a gene associated with the plant TCP interaction network, a gene associated with a plant hormone pathway, a gene involved injasmonic acid (oxylipin) metabolism, acquisition, or signaling, a gene involved in abscisic acid metabolism, acquisition, or signaling, a gene involved in cell cycle and DNA replication, a gene involved in vesicles, autophagy, and phagocytosis, a gene involved in autophagy and phagocytosis, a gene involved in ion/metal transport and osmotic homeostasis, single copy genes in G. orontii MGH1 following recent whole genome duplication including those with unknown function, a gene involved in lipid metabolism, a gene involved in fatty acid (FA) synthesis and/or transport, a gene involved in carbohydrate metabolism, a gene involved in amino acid and/or nucleotide metabolism and salvage and/or cofactor metabolism, a gene involved in nucleotide metabolism/salvage, a gene involved in an essential fungal-specific process, a gene involved in mitochondrial electron transport, a gene involved in transcriptional regulation, a gene involved in nucleic acid translation, a gene involved in signaling, a gene involved in producing a secreted protein, a gene involved in plant hormone metabolism, a gene involved in cell cycle and replication, a gene involved in autophagy and phagocytosis, and a gene involved in cell volume control.

2. (canceled)

3. The isolated dsRNA according to claim 1, wherein said dsRNA inhibits or is capable of downregulating expression of one or more target genes shown in Table 1 or Table 2 (SEQ ID NOS:1-211), and SEQ ID NOs:255-411, and/or orthologues thereof.

4-6. (canceled)

7. The isolated dsRNA of claim 3, wherein said target genes and/or orthologs comprise one or more target genes of SEQ ID Nos: 62-69, 145-148, 164-166, 167-169, and/or orthologs thereof.

8-12. (canceled)

13. The isolated dsRNA according to claim 3, wherein said target genes and/or orthologs comprise one or more G. orontii genes independently selected from the group consisting of Cytochrome P450 monoxygenase (CYP51) (SEQ ID NO:85), TAG lipase 1, caroboxyesterase domain (SEQ ID NO:1), TAG lipase A, extracellular lipase (SEQ ID NO:2), Transaldolase (SEQ ID NO:15), Isocitrate lyase (ICL) (SEQ ID NO:20), Malate synthase (MS) (SEQ ID NO:21), Citrate (Si) synthase (SEQ ID NO:22), Trans-2-enoyl CoA reductase (SEQ ID NO:32), Glutamate dehydrogenase (SEQ ID NO:63), Threonine aldolase (SEQ ID NO:64), Pf02548—Ketopantoate hydroxymethyltransferase (SEQ ID NO:70), Tetrahydrofolate synthase (SEQ ID NO:71), Thymidine synthase (SEQ ID NO:79), Pf8238-Sel1 repeat (SEQ ID NO:87), Apoptosis antagonizing transcription factor (AATF) (SEQ ID NO:92), Pf10453—Nuclear fragile X mental retardation-interacting protein 1 (NUFIP1) (SEQ ID NO:104), G. orontii effector candidate 60/61 (SEQ ID NO:122), G. orontii effector candidate 70 (SEQ ID NO: 123), G. orontii effector candidate 14 (SEQ ID NO: 124), Effector protein EC2 (SEQ ID NO:140), Heat shock protein 70 family (HSP70) (SEQ ID NO:141), J3-carotene 15,15′-dioxygenase (BCDO) (SEQ ID NO:145), Xanthin oxidase (SEQ ID NO:146), ABA G-protein coupled receptor (SEQ ID NO: 148), Acyl-CoA oxidase (ACX_(SEQ ID NO:149), Anaphase promoting complex/20S cyclosome subunit (SEQ ID NO: 163), Pf04109—Autophagy protein Apg9 (SEQ ID NO: 164), Pf03517 Regulator of cell volume after swelling (SEQ ID No. 167), Ctr family Cu2+ transporter (SEQ ID NO: 169), Single copy gene, unknown function (SEQ ID NO: 179), Cyclin-like protein (SEQ ID NO: 180), and Alanine-glyoxylate aminotransferase (SEQ ID NO. 181), and/or orthologs thereof.

14-15. (canceled)

16. The isolated dsRNA according to claim 3, wherein said target genes and/or orthologs comprise one or more target genes selected from the group consisting of CYP51 (Seq ID NO: 85, 182), lipase 1 (Seq ID NO: 1, 183), lipase A (SEQ ID NO: 2, 184), isocitrate lyase (SEQ ID NO. 20, 186-187), malate synthase (SEQ ID: 21, 188), citrate (Si) synthase (SEQ ID NO: 22, 189), trans-2-enoyl-coA reductase (SEQ ID NO: 32, 190), glutamate dehydrogenase (SEQ ID NO: 63, 191), threonine aldolase (SEQ ID NO: 64,192), tetrahydrofolate synthase (SEQ ID NO: 71, 194), thymidylate synthase (SEQ ID NO: 79, 195), apoptosis-antagonizing transcription factor (AATF) (SEQ ID NO: 92, 197), Effector candidate 2 (EC2) (SEQ ID NO: 140,201), f3-carotene 15,15′-dioxygenase (BCDO) (SEQ ID NO: 145, 203), xanthoxin oxidase (SEQ ID NO: 146, 204), ABA G-coupled receptor (SEQ ID NO: 148, 205), acyl-coA oxidase (ACX) (SEQ ID NO: 149, 206), Autophagy protein Apg9 (SEQ ID NO: 164, 208), Ctr family CU2+ transporter (SEQ ID NO: 169,210), cyclinlike protein (SEQ ID NO: 180,211), and alanine-glyoxylate amino transferase (SEQ ID NO: 181), and/or orthologs thereof.

17-51. (canceled)

52. The composition according to claim 3, wherein said ortholog is an ortholog found in a powdery mildew selected from the powdery mildew genus Golovinomyces including G. orontii and G. cichorachearum (of curcubits), Erysiphe including E. necator (or Uncinula necator) (powdery mildew of grapes), Blumeria including B. graminis f. sp. tritici (causes powdery mildew of wheat), f. sp. hordei (powdery mildew of barley), Microsphaera including M. diffusa (powdery mildew of legumes, e.g. soybean), Leveillula including L. taurica (also known as Oidiopsis taurica) (powdery mildew of onion or artichoke), Podosphaera including P. leucotricha (powdery mildew of apples and pears), P. macularis (powdery mildew of hemp and cannabis), P. xanthii (powdery mildew of cucurbits:cucumbers, squashes (including pumpkins), luffas, melons, and watermelons), and P. pannosa (powdery mildew of roses) or wherein said ortholog is an ortholog found in a plant rust selected from the group consisting of Cronartium ribicola (White pine blister rust), Gymnosporangiumjuniperi-virginianae (Cedar-apple rust), Hemileia vastatrix (Coffee rust), Phakopsora meibomiae and P. pachyrhizi (Soybean rust), Puccinia coronata (Crown Rust of Oats and Ryegrass), Puccinia graminis (Stem rust of wheat and Kentucky bluegrass, or black rust of cereals), Puccinia hemerocallidis (Daylily rust), Puccinia triticina (Brown Wheat Rust), Puccinia sorghi (Common Rust of Corn), Puccinia stri˜formis (Yellow Rust) of cereals, Uromyces appendiculatus (Bean Rust), Puccinia melanocephala (Brown Rust of Sugarcane), and Puccinia kuehnii (Orange rust of Sugar cane) or said ortholog is an ortholog found in an ascomycete selected from the group consisting of Botrytis sp. (grey mold), Fusarium spp. (Fusarium wilt disease), Thielaviopsis spp. (canker rot, black root rot, Thielaviopsis root rot), Verticillium spp., Magnaporthe grisea (rice blast), and Sclerotinia sclerotiorum (cottony rot) or said ortholog is an ortholog found in a Basidiomycete selected from the group consisting of Ustilago spp. (smuts) smut of cereals, Tilletia sp. Rhizoctonia spp., and Armillaria spp. (honey fungus species, virulent pathogens of trees).

53-69. (canceled)

70. The isolated dsRNA molecule of claim 3, wherein the dsRNA molecule comprises a single RNA strand comprising an inversely repeated sequence with a spacer in between and wherein the single RNA strand can anneal to itself to form a hairpin loop structure.

71-78. (canceled)

79. The isolated dsRNA molecule of claim 16, wherein said dsRNA comprises a nucleotide sequence selected from the group consisting of SEQ ID NO: 212, SEQ ID NO:213, SEQ ID NO:214, SEQ ID NO:215, SEQ ID NO:216, SEQ ID NO:217, SEQ ID NO:218, SEQ ID NO:219, SEQ ID NO:220, SEQ ID NO:221, SEQ ID NO:222, SEQ ID NO:223, SEQ ID NO:224, SEQ ID NO:225, SEQ ID NO:226, SEQ ID NO:227, SEQ ID NO:228, SEQ ID NO:229, SEQ ID NO:230, SEQ ID NO:231, SEQ ID NO:232, SEQ ID NO:233, SEQ ID NO:234, SEQ ID NO:235, SEQ ID NO:236, SEQ ID NO:237, SEQ ID NO:238, SEQ ID NO:239, SEQ ID NO:240, SEQ ID NO:241, SEQ ID NO:242, SEQ ID NO:243, SEQ ID NO:244, SEQ ID NO:245, SEQ ID NO:246, SEQ ID NO:247, SEQ ID NO:248, SEQ ID NO:249, SEQ ID NO:250, SEQ ID NO:251, SEQ ID NO:252, SEQ ID NO:253, SEQ ID NO:254, and SEQ ID NO:255.

80. A composition for controlling or preventing an infection of a plant by a phytopathogenic fungus, said composition comprising one or more of said isolated dsRNA molecules according to claim 79.

81-82. (canceled)

83. The composition of claim 80, wherein said composition comprises two or more dsRNA(s) that inhibit or are capable of downregulating expression of the two or more target genes independently selected from the group consisting of SEQ ID NO: 1, SEQ ID NO:2, SEQ ID NO:3, SEQ ID NO:4, SEQ ID NO:5, SEQ ID NO:6, SEQ ID NO:7, SEQ ID NO:8, SEQ ID NO:9, SEQ ID NO:10, SEQ ID NO:11, SEQ ID NO:12, SEQ ID NO:13, SEQ ID NO:14, SEQ ID NO:15, SEQ ID NO:16, SEQ ID NO:17, SEQ ID NO:18, SEQ ID NO:19, SEQ ID NO:20, SEQ ID NO:21, SEQ ID NO:22, SEQ ID NO:23, SEQ ID NO:24, SEQ ID NO:25, SEQ ID NO:26, SEQ ID NO:27, SEQ ID NO:28, SEQ ID NO:29, SEQ ID NO:30, SEQ ID NO:31, SEQ ID NO:32, SEQ ID NO:33, SEQ ID NO:34, SEQ ID NO:35, SEQ ID NO:36, SEQ ID NO:37, SEQ ID NO:38, SEQ ID NO:39, SEQ ID NO:40, SEQ ID NO:41, SEQ ID NO:42, SEQ ID NO:43, SEQ ID NO:44, SEQ ID NO:45, SEQ ID NO:46, SEQ ID NO:47, SEQ ID NO:48, SEQ ID NO:49, SEQ ID NO:50, SEQ ID NO:51, SEQ ID NO:52, SEQ ID NO:53, SEQ ID NO:54, SEQ ID NO:55, SEQ ID NO:56, SEQ ID NO:57, SEQ ID NO:58, SEQ ID NO:59, SEQ ID NO:60, SEQ ID NO:61, SEQ ID NO:62, SEQ ID NO:63, SEQ ID NO:64, SEQ ID NO:65, SEQ ID NO:66, SEQ ID NO:67, SEQ ID NO:68, SEQ ID NO:69, SEQ ID NO:70, SEQ ID NO:71, SEQ ID NO:72, SEQ ID NO:73, SEQ ID NO:74, SEQ ID NO:75, SEQ ID NO:76, SEQ ID NO:77, SEQ ID NO:78, SEQ ID NO:79, SEQ ID NO:80, SEQ ID NO:81, SEQ ID NO:82, SEQ ID NO:83, SEQ ID NO:84, SEQ ID NO:85, SEQ ID NO:86, SEQ ID NO:87, SEQ ID NO:88, SEQ ID NO:89, SEQ ID NO:90, SEQ ID NO:91, SEQ ID NO:92, SEQ ID NO:93, SEQ ID NO:94, SEQ ID NO:95, SEQ ID NO:96, SEQ ID NO:97, SEQ ID NO:98, SEQ ID NO:99, SEQ ID NO:100, SEQ ID NO:101, SEQ ID NO:102, SEQ ID NO:103, SEQID NO:104, SEQ ID NO:l05, SEQ ID NO:l06, SEQ ID NO:107, SEQ ID NO:l08, SEQ ID NO:109, SEQ ID NO:110, SEQ ID NO: 111, SEQ ID NO:112, SEQ ID NO:113, SEQ ID NO:ll4, SEQ ID NO:ll5, SEQ ID NO:116, SEQ ID NO:117, SEQ ID NO:118, SEQ ID NO:119, SEQ ID NO:120, SEQ ID NO:121, SEQ ID NO:122, SEQ ID NO:l23, SEQ ID NO:124, SEQ ID NO:125, SEQ ID NO:126, SEQ ID NO:l27, SEQ ID NO:128, SEQ ID NO:l29, SEQ ID NO:l30, SEQ ID NO:l31, SEQ ID NO:132, SEQ ID NO:l33, SEQ ID NO:134, SEQ ID NO:135, SEQ ID NO:136, SEQ ID NO:137, SEQ ID NO:l38, SEQ ID NO:139, SEQ ID NO:140, SEQ ID NO:141, SEQ ID NO:142, SEQ ID NO:l43, SEQ ID NO:144, SEQ ID NO:145, SEQ ID NO:146, SEQ ID NO:l47, SEQ ID NO:148, SEQ ID NO:l49, SEQ ID NO:l50, SEQ ID NO:l51, SEQ ID NO:152, SEQ ID NO:153, SEQ ID NO:154, SEQ ID NO:155, SEQ ID NO:156, SEQ ID NO:157, SEQ ID NO:158, SEQ ID NO:159, SEQ ID NO:160, SEQ ID NO:161, SEQ ID NO:162, SEQ ID NO:163, SEQ ID NO:164, SEQ ID NO:165, SEQ ID NO:166, SEQ ID NO:167, SEQ ID NO:168, SEQID NO:169, SEQ ID NO:170, SEQ ID NO:171, SEQ ID NO:172, SEQ ID NO:173, SEQ ID NO:174, SEQ ID NO:175, SEQ ID NO:176, SEQ ID NO:177, SEQ ID NO:178, SEQID NO:179, SEQ ID NO:180, SEQ ID NO:181, SEQ ID NO:182, SEQ ID NO:183, SEQ ID NO:184, SEQ ID NO:185, SEQ ID NO:186, SEQ ID NO:187, SEQ ID NO:188, SEQ ID NO:189, SEQ ID NO:190, SEQ ID NO:191, SEQ ID NO:192, SEQ ID NO:193, SEQ ID NO:194, SEQ ID NO:195, SEQ ID NO:196, SEQ ID NO:197, SEQ ID NO:198, SEQ ID NO:199, SEQ ID NO:200, SEQ ID NO:201, SEQ ID NO:202, SEQ ID NO:203, SEQ ID NO:204, SEQ ID NO:205, SEQ ID NO:206, SEQ ID NO:207, SEQ ID NO:208, SEQ ID NO:209, SEQ ID NO:210, SEQ ID NO:211, SEQ ID NO:212, SEQ ID NO:213, SEQ ID NO:214, SEQ ID NO:215, SEQ ID NO:216, SEQ ID NO:217, SEQ ID NO:218, SEQ ID NO:219, SEQ ID NO:220, SEQ ID NO:221, SEQ ID NO:222, SEQ ID NO:223, SEQ ID NO:224, SEQ ID NO:225, SEQ ID NO:226, SEQ ID NO:227, SEQ ID NO:228, SEQ ID NO:229, SEQ ID NO:230, SEQ ID NO:231, SEQ ID NO:232, SEQ ID NO:233, SEQ ID NO:234, SEQ ID NO:235, SEQ ID NO:236, SEQ ID NO:237, SEQ ID NO:238, SEQ ID NO:239, SEQ ID NO:240, SEQ ID NO:241, SEQ ID NO:242, SEQ ID NO:243, SEQ ID NO:244, SEQ ID NO:245, SEQ ID NO:246, SEQ ID NO:247, SEQ ID NO:248, SEQ ID NO:249, SEQ ID NO:250, SEQ ID NO:251, SEQ ID NO:252, SEQ ID NO:253, SEQ ID NO:254, and SEQ ID NO:255.

84-85. (canceled)

86. The composition according to claim 80, wherein said composition is provided as a spray, drip irrigation, a drench, granules, a seed coating, inoculation in plant growth medium, as a mist or fog, injection in stem or other plant parts or as a plant-incorporated protectant.

87-88. (canceled)

89. The composition according to claim 80, wherein said composition comprises said dsRNA(s) associated with a particle or nanoparticle or said dsRNA(s) incorporated into a lipid or liposome, incorporated into an anucleated cell.

90. The composition of claim 89, wherein said particle or nanoparticle comprise a clay, an inorganic polymer, organic polymer, a chitosan polymer, or a chitosan derived polymer.

91-94. (canceled)

95. The composition according to claim 80, wherein said composition is provided as a component of a microbial cell or microbial fermentation product.

96. The composition according to claim 80, wherein said composition further comprises at least one additive from the group consisting of adjuvants, attractants, growth-regulating substances, insect feed, pheromones, proteins, carbohydrates, polymers, organic compounds, biologics, biostimulants, other biological or synthetic pesticidal agents, and other biological or synthetic growth-regulating agents.

97-117. (canceled)

118. A method of conferring phytopathogenic fungal resistance to a plant or the part thereof, said method comprising:
introducing into the plant or the part thereof:
(a) a DNA encoding double stranded RNA (dsRNA) according to claim 16;
(b) an expression cassette comprising the DNA encoding double stranded RNA (dsRNA) according to claim 16, or
(c) a dsRNA according to claim 16.

119. A method for controlling or preventing an infection of a plant by a phytopathogenic fungus, said method comprising:
(a) contacting said plant and/or said pathogenic fungus with an isolated double-stranded RNA according to claim 16; or
(b) expressing in said plant at least one isolated double-stranded RNA according to claim 16.

120. The method of claim 119, wherein said contacting comprises spraying, dunking, coating, watering, or irrigating said plant.

121-122. (canceled)

123. The method according to claim 120, wherein said contacting comprises applying said dsRNA to a plant selected from the group consisting of grape, wheat, barley, legumes, e.g. soybean, onion, artichoke, apples, peaches, pears, cucurbits, cucumbers, squashes (including pumpkins), luffas, melons, watermelons, hemp, cannabis, roses, strawberry, hops, coffee, oats, ryegrass, a cereal, rice, corn, and sugar cane.

124-147. (canceled)

The application's sequence listing, which the Patent Office published only in electronic form, follows.

SEQUENCE LISTING (416 sequences)

SEQ ID NO: 1 - DNA, 1758 bp, Golovinomyces orontii
  source 1..1758: mol_type = genomic DNA
atgttatcaattctttttctttcggcaggattcctttcatgttgtagagctaccagtcctgcgactccttattaccctagctcaaccgatccagcttcactgagtgaacctgagcacgatgacaattcaactgtattacgcggtatctcaattcaattaagttatgcgactgttctcggttcaagccgtcatggtattgatagtttccgtgggatcccatatgccaaaccacctgtaggtccattacgactacgacgtccagaaccaatcactcagaacttaggcacagtcgatgcatcgatccctattccaaattcctgtccgcaacaattcacttcaacaaatccaaacaatactgtgccccaggatgcactccaacagattatcaacagtggagcagtgcagcgtcttcttcatatcagtgaagattgtttgactataacagtacaaaaaccacatgacgctacgcctgaatcaaattatccagttgtgtactcactcttctttggcggcttcggttttggttccacggctttatatgatgcttcaaaacttattcaagcatccatagacgcaggtaaacccatcgtctatgttgctgtcaattatcgtttaggggcatttggttggctcggtggtcaagagattcttgacgcgggactttctaatttaggtcattatgatcagatccttggcctccaatgggtgcaagacaatattgcaaagttcggtggtgacccaagtaaggtgacattatttggaacctctgctggttctatctctgcttttaacttattagtcgccaaagatggtgctttatcttataatggcaaaccgctattccgtgctgctattatggacagtggtagcatcgtgcctactgatgcggtgaactccccgaagccacaaaatgttttcgatcaagtcgtgagtgctggaggctgtagtgaagcatatgacaaaattagctgtctacggaatctcgactacaccgagtttttgttcgcaagtacatcagttcctggtctatttgactaccaatcagtagcactttcatacatcccgcgacctgacggtgatcttttgaccgcatctatggatgaattggctgcgaacggaaaaatggcccctgtacccttcattatcggcgatcaagaagacgaagggacgttattttcactggtgcagaaaaatataaccaccacggaggacattttcgattatctcaaactatatttcttcaatgatgcaagcgatgagcagctccagactttaatcaacctctatcccgacgacccggctgctggttcgccgttcaacacgggaagattaaacaatatatatccccagtacaagcgtcttgccgctatattaggagatatggtcttcaccatgattcgtcgtgttctcttggaatttagaataaaaacccgaccagatattcctgtatactcatatatatcttcatatggttatggaacgccgattatgggaacgtttcacgtgactgatgtattaccagcatatggtattattcctggtttcccaactcggagcgtacaaaattattacatcaacttcatatgtgatcttgatcctaactccggtagtggttcatcatttattcattggcctacctggaatgaaaagcgcgaggttataaactttcgtaagtataataacgatatttgggatgacgatttccgcatagagagttcgaactttttgggtacaaaccgtaatgcgttccatttttga

SEQ ID NO: 2 - DNA, 1314 bp, Golovinomyces orontii
  source 1..1314: mol_type = genomic DNA
atgtctaggcatacatctgcatttttcgttctctttcctacattattcgtcatattagccagtgcctatcaatcacactatggctcatcctatcatcagcaagagtctcttcaatctgacgcacaatggaatagcaatatctctgatactttattcctggagctagaggaactagctcgtatcgttgatattgcttactgtgttggtacaacaggaatctctagcccttttgtatgcgcctcgcattgcagcgattttccaagctttgaactcgtggatacattccattcaggatacttattgggcaatagttgcggttacattgcacttgatcatgcgtcggacaataacagaggacgaatactggtagttttcaggggtacatacagtatcgacgacactataatagacctgactatggtaccacaaaagtacgcgccatacccgtctcatcacgaaaataatttcaaaagatcagaatcaagcccactttttaatttaatacctagtaaagaaattcggtccctcttacgctcattctcacgtatatttcatcgtcgaaaaggaagtaggccagaaagacatatgcactctaacattgaatgtacgaactgcactgttcatatgggattttggacaagctaccaacaaatacgtcctcatttattctccaagattagtagccttcgaaaaaaattccctaactatcgattggatttagtcggacactcactaggtggcgctgttgctgctcttgctggacttgatcttaaattacttggatacgaacctatcgtaacaacctttggtgagccacgcgttggaaatactggattcagagatttcatggatgccacatttaacctacgctcccagaactcagggggtcatttagacatgccaagctgcaaagatcactatcgtagagtgactcatacaagtgatcctatgccattactaccgccgcaagattttggctatcgcccacatgctggcgaggtattcatctcaaaacgagatcttccagtggcaatacaagacgttcgtcactgttttggtgacgatgatgtgaactgtatcgaggaaagaggaaacaatagagtttggactgatttatctgagacgtcgaaaataagagccggcaccaaagactccttagatgccaggggtggcgaattgaaaaaacgagatagggtacgattacatcctccccatctttggcgaccctttctagcgcatcgtgactatttttggcgcctaggattatgcgttccaggagatgatccaactggtcaagtaagagacgaggtttag

SEQ ID NO: 3 - DNA, 1533 bp, Golovinomyces orontii
  source 1..1533: mol_type = genomic DNA
atggagagtgtgaacgatattggcactcttcgtcaaagacgatctatcgctgttacaatctctcctgtagatctctctcgaaatgaagctgtcaagattcaacccctggctcaggtacgagcacgaaagaagtataagcacgctgctgtagtccattcgaccacaagaacgtcatgtctaagtcacgaatccccggaagctccaagtttcttgggtttcagaaacttaatggtactagttcttatcattggaaatttgcggttaatgatggagaatttcaaaaaatatggtgttttaatttgcatacagtgtcataactatcgatcacaggacattgtcttgggcatggcgttactatttattataccctgccacctatttctcgcatacgttgtggaattaattgctgcacaacaagctagggtcttattacgattaggaaaggaaagaaaaggaaccgcaacccctgggggtagttacgtggcatcagaagaggagaaccgtgtatttcaaaaaacctggagcattatagcttggattcacagcattaacgcatctttatgtcttttaatcacatccgttgtggtatattttttcatccaccatcccctcatcggaaccttgagcgaagtacatgctctcgttgtctggcttaaaactgcctcatacgggctgacgaatcgtgatcttcgacactcgtacttgcatccctctaatcgagaggctgatgctctgccagagttatacaagaagtgcaattacccttggaatatttcacttagtaatctaatttacttctggtgggcgcccactttggtatatcaacctatgtatccgcggacgcctaagatccgatggatttttgtggctaagcgtttggctgaagtgttcgggttaaatgtttttatttggatagcgtctgtacaatatgctactccagttctacgtaattctcttgataagatagcaacacttgactttctttctatcttagagcgactcatgaaattatcaaccatcagtttagtaatttggctagctggatttttcgcactattccagtcgtttcttaatgccttagcagagataatgcgatttggagaccgggaattctacacagattggtggaatagtcgttcggtaggaatttattggcgtacttggaacaggcctgtctatcattttatgaagaggcacatatatacacctttgagagggcgaggctggggtagcatgggagctagtcttgcagtttttcttttttcggcaataatgcatgaattacttgtgggaattccgacacataatatgataggtgttgcatttatgggaatgatactacagttacctctcatcgtgtttaccgcgcctctagagaagatgaaaggtatgaatgcgaggataattgggaattgtattttttggttatcatttacagttattggacagccattggctgcgctattgtatttttttgcctggcaggcaaaatatggaagtacgagcaggccagtcataatgtccaaaatttga

SEQ ID NO: 4 - DNA, 948 bp, Golovinomyces orontii
  source 1..948: mol_type = genomic DNA
atggcagagacacgctttaaattgaataccggggcagagattccagctttgggcctaggaacttggcagtcggaaccatcagccgtcaaaaatgctgtttcatacgccttgtccatcggatacaagcatatcgattgcgcatatgtctactgcaacgaagatgaagtaggtgaaggcctgaaagaggcttttgccaaaggcgtgaagagagaagacatttttgtcacctcaaagctttggtgtacctatcactcccgtgcagaggaagctcttgataagagcttaaaaagtcttaatctcgaatatgtagatttgtacttgatgcactggcctttggctatgaaccctaaaggcaaccatgatattgcgcccaaactatctgatggatcctatgatttagttaaagattggacacatatccaaacttggaagagtatggaaaagctcttggaatccggcaaagtcaaagccataggtgtttccaactactctgtaagctacctgaaagaattaatgccacatgtcaagatcactccagccgtaaatcaaatcgagaatcatccctccttaccgcaacaagatgttgtcgatttttgtagagagaaaggaatccatgtcacggcatatagtcctcttggaagtacaggctgccctctgatgaaggaatcatctatcattcagttagccgagaaaaagaaagccgaaaatgagaaaataacacctgcatcgatcctcttaagttatcatgtcgcgagaggcgtctcagtttttgcaaagtcagtcaatgaggaacgtataaaagcaaacaaggaaactttaatcaaacttgactctgaagatatgaaagttctaaatgactattcagatgaattggccaaaaacggaaaacagactaggcacattttccccccatttggcgttaactttgggttcccggataaatcttga

SEQ ID NO: 5 - DNA, 879 bp, Golovinomyces orontii
  source 1..879: mol_type = genomic DNA
atgagtacctcaacggtaaaaatagattttgctcccaacgttaagcttaacaatggcattgagatgccatcggttggatatgggctgggcacggctcgctctaaatcagatttaaatgcaccggaagataaagaatttgttcaactcgttgttacggccattaaagctggttattatcatcttgatggtgccgagatctacaaaaacgaaaaggaactcggggctgctattgcacaggcaggggtacccagggaacaattatttgttactacaaaatatctggcagcttttgagctctcattgaaaaatatgggcttagattacgttgatcagtatctaattcatgccccatactgttacaattcagatcacgaacttcagcagaagtgggcagatatggaggctatttatgcatcaggtaaagctaaatctattggcgtatcaaatttcctgcgagagcatcttgaagtgattcttaagactgccaaagttatcccagcaatcaatcaaatagaatatcatccgtatctgcaacatggaaatctcatagctttccagaagaagcatgggatcgctacgtcagcgtatgcaccccttacggcagtcaccaaagcaaaaccaggccctcttgatgataaatataatgaactagctaataagtactgtgtcactcctggagaaatcgcacttcgatggatcattgaccaaggagtcgttgcaataactaccagtggaagtaaggaaagactagaacaatatcagaagatcagacaatttaagctgacgcaggaagagcttgattcgatcactgagatcggtaagaagaagaactatagaggcttctggaatgccaaattcgcagctgatgattggtcataa

SEQ ID NO: 6 - DNA, 1776 bp, Golovinomyces orontii
  source 1..1776: mol_type = genomic DNA
atgctgtggctctcagataaaacagtcatagccggatgtgccctagtgattacctggctgtatttcacagtcactatataccattggtggaactgcgaaaaaccgattcattatgagattcgtgtcccccagccacctgtagattcgaagattctgacacacccttccatcagggtggaaggttcaacagcaattcaatgttatgctccagctacaggaaaatttttgggatatgttaatcctcaaagtcctaatggtatcgatcgcgccattcttaaagcacaagaagcccaaattcaatggtctaagacgtcttttagccagcggagaaaggttctccggtgtatacaggctcatattttggagcatcaaagagagatttcccaagtagcttgtttggattcaggaaagactttgatcgatgcaacactaggtgaaatcctggtgacagtagaaaagataaactggacttgtcttcatggagagaaagctctcaaacactctcaaagaccgacaaatttacttatggcttataaaaagaatcatgtcagatatgagccattgggggtagttgcagctctcgtgtcctggaattatcccttccacaacttaatcggacctatgatatcagctgtatttactggaaatggtatcatagtcaaagcctcggaaaacacagcatggagtgccgcatactttacccaaattgtaaaagaagctttacttatatgcggtcacaaccctcagcttgttcagactattgtaacctggcctcagacagcaaattacctcacatcacatccaggcatctctcatatcacttttattggaagccgacctgtcgctaaacttgtcgcagcctcagcagctaagtctcttactcctatagtcgctgagctaggtggcaaggatgctgccatcatccttgactcggctaagtatgatcttccacgaataagcgaaattcttctccgtggcagttttcaagccgctggtcaaaattgcattggcattgagagaataattgcgtgcccacaagtatatgacaagcttattaagattctattgccacgtgtagaatccattcacgtaggctcgattctcgatacacggaaagagattcaagtagatatgggtgctatgatatctgatatatcctttgacagacttgaaaatctaataaagttggcagttgaagacggtgctcgtttgctcgtgggtggacatcgattcaagcatccaattcatgtccatggtcattactttgagcctacacttcttgttgatgttactcctgaaatggctattgcaaacgaggagtgttttgggccaatttgtcttcttatgcgggctaaggacgcacaagaagcttgtgccatcgcaaataaacctgatttcggcctgggatcatcgatttttggtgctcgcgatgatacgacgaaaaatgtgattctaaatataaaatctggcatggttgcagtgaatgactttgcagcttactacgctgtacaactaccttttggtggtgtgaagggaagtgggtatggccgtttcgctggagaggaaggcctacgaggtttatgtaacatcaaggctgtctgtgaagatcgatgggattacttaaatattcgcactgcaattccgaagcagattcaatatccaattctcgatacactaaagggttacgagtttgtaaggggagtagtggagatcggctatggggtggggatcctaaagagaattagtggagtgtggagagtatggaaaaatcgctaa

SEQ ID NO: 7 - DNA, 1764 bp, Golovinomyces orontii
  source 1..1764: mol_type = genomic DNA
atgagatctttactctttcaatttctaagatcaaaaaagaagaagcagaaactaaatgagcataagaatggcttcaattttactgctcgaggtctgttttggatcgctatggctggcatcttcgcaaataaaaacgatctcattgacttaccagaaattggtgagctgagtatggataatctactagatgtcttgccagcaagctacataaaacatgtaaaagacttagcgaaatccgaacgggattccgtaaactatgattccttttctgtcggaatcaatctcttgtcccaaggcgtccgtgcaaaccactctgtcattatgatccctggtgtaatttcttcaggcttggaatcatggggcaccacaaacaattcgaggcaatacttcagaaagagattatggggaagttggaatatgatgcgtgccttggttctcgataaggaaggatggaagaaacatattatgttagataaaagaacagggctagatccagagggtgggattaaactacgtgctgcccaaggatttgatgccacagattttttcatcacaggatattggatctggaataagattatagaaaatctagcaaccattggttacgatcctacaaattcctacacggctgcctacgactggcgcttatcatatgcaagtttggagacgagagatcaatactttacgaggttaaaactgtacatagaaatgtcccgacaggtgtccaaaaaaaaagttgtactggtctcacattcaatgggaagccaagttattttctatttctttcattgggttgcttcggctcagggaggtaatggaggagatgattgggtagaaaataacgttgactcttggattaatatcagcgggtgtatgttaggagccatcaagggacttccatcggtcctctctggtgagatgaaagatacggctcaactcaattcgttcgctgtttatggactagagaaattcttaagtaaggtggaacgcgccgaaatttttagggctatgccagggataagctcaatgctgcccatgggtggaaatgctgtatggggtaattctacgtgggcacctgacgaaccagatcaaatatttagatatggacaagctcttaagttcagacagcctgggtcccgtaatttgactgtagaagacagccttacatacttgatgagtagcactgaagactggtatcaagatcaagtacgcgagagttattctcacggagttgctcacactacagctgaagtagagttaaacgagctcgtcccaaggaaatggattaatccactcgaaacgaggttaccacttgcaccgaatctgaagatatactgcttttatggtattggtaaacccactgaacgtgcttattattatcggaattcttcatctcttgatatttcgatagatactactataacaagtggtaatatcgatcacggtgtgattatgggtgaaggagatggcacggtgaacttactctctattggatacatgtgtaacaaaggctggaatatgcatcgatataacccatcaaagataaaaatcaaagtaattgagatgcctcatgaaccagatagattcaatcctcgcggtggtccaaagacaggtgatcacgttgatatcctcggtagacagagtcttaacgatatgattctcagaattgcagctggaaaaggagccgagatcaaagatcacgtgatcagcaaaattagattatattccgagagagttcaaatcaaagaagaagatggctattga

SEQ ID NO: 8 - DNA, 1119 bp, Golovinomyces orontii
  source 1..1119: mol_type = genomic DNA
atgtgcaattcttacttgttaaagggattagtgaattctctcaatactccagactcaagaagagtcattgccgattcaatggttaagcagaggcaagaaaagagtgacctgcaatgggctcccgtgaatattccgctaaaacgacggttacaaacttttgttgtccttcttcacaccctcagtttaccgctctgcttatcactgttctttttccttcttgctatacctttattctggccagtattgataccatatattatctattgtttaagatcaaaagcttcaacatccgggaaattgtgccgccggtcatcacttttacgctctctaccaatttggaatttatttgcgggttactttcctgcacgacttcatcgtagtcaagaactcattccgacaagaaagtatatattcggctatcatcctcatggaatcatctccatgggagcctttgcagctttctgcacagagtctcttggttttacacaattgttccccgacattgaaaatactcttcttactttgggttcgaattttagattaccattctatcgagactacgctttagctatgggtttggcgtctgtttctaggaaatcatgcgaaaatttgttatccaagggaggcattaacaatgaaggtatgggccgtgccataactatagttgtcggaggagcacgcgaatccttagatgcccagccaggtaccctccgtttgattctcaactgccgcaaaggtttcatcaaattggccatccgtaccggcgcggaccttgtgcccgttcttggatttggcgaaaatgatctctacgaccagattcagccaattaggcatccaagaatccaccgtgtacaactattcttcaagaacatactcggcttcaccattcctctctttcatgcgcggggtgtatttaactatgatattggatggatgccttatcgaagaccgttaaacatcgtcgtcggtcgaccgatttttattaagcagaaccctaaccctgaacctgaggaagttgatcggattcataaaaagtacatacaagaacttgaacggatatgggagacatggaaggatgaatctgcaccgaacagaacagaagaattatcatacatctag

SEQ ID NO: 9 - DNA, 858 bp, Golovinomyces orontii
  source 1..858: mol_type = genomic DNA
atgtcaaatatcatctacaatatcggtctgggcataggaagttacttggcggctactgtgattctctatttactctcgacgatagttcctgtggcgggtttctttgcacgtcttctcgccgcttacgcatccctgattttctgtgcatctataggtgtaatttcatcgatatttctgcgtctaatcggatatcaacgaatttcgcaatggtttgtcgccagatgcttcaaatacaccatgtggtgtacgacaggcatcacattcacaatcgacgatccaaataactatctaaacgagactcgtccagctatatttatcggtaatcatcagacggagctagatgtattaatgctcggctgtatatttccgaaatggtgctcagtcaccgcgaaaagatcccttaaaaagataccattcttaggctggttcatggctctatctggctccgttttcatcgaccgtacaaattcccaaaatgctagacaggctatggcgggggcatccgacgaaattacgagagagagacagagtgtgtatatgtttcctgaaggtaccaggagctatgcaaaacaacctaaacttctgtcgtttaaaaaaggtgcatttcaccttgctgtgcaagctggcgttccaattgttccggtagtagtcgcaaattactcacacattctaaatccgagcactctcacattcaaaagtgggaaaatacctgttcgagttttaccacccatcgaaacaaaaaatttgacgtcagccgatgttgaagaccttactcgtgaaaccgaaaaattgatgcttaaagagattattgtattgacatccgaaattcgcagagatcctttatcaataacgacctag

SEQ ID NO: 10 - DNA, 1602 bp, Golovinomyces orontii
  source 1..1602: mol_type = genomic DNA
atgtccaagatccgtcaaagcggcgaggttaccagccatggcacagctgaaaaaaaatcacattggtatgttggaagtatcgattgtggtactacgtcttcacgatttctgatcttcggaagagatggaaatccagtcgcaagccatcaaatagaattgaacaatattcacgccaatcccggatggcatgagcatgatccgctagagctagtctcgactgttattgcttgtatcgaagaagctaccagcaaattcatcaagcaaggtcacaatgaaaatcaaatcaaatctattgggataactaaccagcgtgagacgacgatttgttgggacacgaaaactggcgaaccattatataacgccatagtttggtcagacacaaggactaaatcaattgtgcgggagttaaagaggaaaacagggtcagccgaattgctacagctttgtggcttaccaatctcaacatatccctctagcattaaattactttggctgattcgaaatatcgaatccataaaagatgcctacgaagaaggaagattatcttttggaacggtcgattcttggctaatctataaacttaatggtggcgagcaggcaggagtccacgttactgatccgaccaatgcatcacgaacaatgttcatgaatataaattcatttcaatatgacgataaacttcttgaattcttcgaaattagccggaaaaatgttgctttgcctaaaattgttccgtcgtcagacaatatggcgtatgggaagctggtgagtggaactttaaggggcactagaattgctggttgtcttggtgaccaatctgctgctcttgtaggccaaggtggattttctcctggacaggcaaagaacacatatggaacaggctgtttccttctctacaacgttggtgaaaagccaattatatctaattctggcctccttgcaacagttgcctatgatttcggccataaatacaagcctgtatatgctctcgaaggaagtgtcgctgttgctggctcaggggttaagtttctgaaggacaatatgggctttgtctcacactcaagtatggtaagtgagctggctacttcagttgaggataatggaggaattgtcttcgttacagccttcagtgggttgttcgccccttactggattgatgacgccaggggaactatttttggaataacagcacatactcaacgtggtcatattgctcgtgcaacactagaagcaacctgtttccagacaaaagctattttagatgccatggagaaagattctggatataaatttgaaagtctatcagttgatggtggcttatcaaattcagacctatgtatgcagattcaagccgacattattcggatacctgtagacagaccaatgatgcgcgaaactaccgctctcggggccgctatcgctgcagggttagcaattcatatgtggcaagatctggatgagttgcgcgacatcaacagagcaggccgcgatatttttaccccacagcttgatattcagagttctacgaatatgtttcgtaaatgggaacatgctgttcagatgagtcgtgggtgggacagggaagttgaagagataaattag

SEQ ID NO: 11 - DNA, 879 bp, Golovinomyces orontii
  source 1..879: mol_type = genomic DNA
atggcttcagttctgaaaagacttcctgggcaatggcataggacaatagcgacgagtaactcggcaggttttcatctgcctcttgctttcgacatttacaagcctcaaacaatggcgaattcagaagctattatcgttctacatggactcttcggatcaaaaaagaacaatagaggtatcagtaaagttctcgcgcgagatttgggaaggccggtttatgctatagatctgcgaaaccatggcgactcaccgcatagccaagaacacgattatctctccatggcagaggacttatcttggttcatttctacgcatggtcttaagaatccaactcttattggccattcaatgggagccaaagctgcaatggctttagccctccaacatccctccctcattcaagacattgtttcagtggataatgcgcctgcaaatactatgttcccgagtgacttttctcgctacatcgaaggtatgcataaggtcgaagcagctaaagtacataaacaatctgaggcagatgaaatcttgcagggttacgtcgagtcacttcctgtccggcaattccttctagggaatctctatcgcactgaagataaaagtcaaaaatttaaaattccgcttgaaatactaaatcgtagtcttataaatctccgcaacttcccaaatcaggaacttgagtcttacaaattccaaaagccttctctttttgtccgcggtacaaagagtaaatttattccgaatcatttattgccaggaattgagaaattatttcctcaatacaagctggttgatattgaagccggtcactgggtcatttccgagagtcctgatgagttcagaaaagctgtcgtccaattcttgagccgaaaagaataa

SEQ ID NO: 12 - DNA, 1434 bp, Golovinomyces orontii
  source 1..1434: mol_type = genomic DNA
atggctgtcgagaaagccttctctgcaggcaaaatcatggctcaattattcctattacttcttgcccaaacagcatatacttcctccattcaggcgtcattccaacaggcaatacagcctacctcaccgcttttgctttcagcaccaccttctggacccccagtattagattcaaacctgttcaagttacgccacgtcttccatcatggtgacctcagtcaacctggacttcacaaaagatatgatgtgatagaaccagagaaagcggtttggatcgaatcagatgctggaatcagagtgcaaaacagccgaaatctaagaactataaataggccgatcaagatccaccgattaagaaaccgacaaccctctgtcattgactctttattggaattttccaggaattacccccaaatatggacctcggctcaagatgagtgggggttggagacggtacttgcaccagatttgacagatgttgacacgattttgacattagcccaaatgtcagcgaatgcttacctggaacatagcgatagcaaagactgggctaatgttcgagaaggttttaattggacttattccactggttttggctggaatggcgatggcttgaaaggatacctgtacgcagacgataataactctaccgttgtcattgctgtgaagggtacgtccttcgcactatggagcaacgaagatactgcaaaaaatgacaaaataaacgataatctattctttagttgctgctgtggccagcagggtaacgctttttaccgaaaagtgtgtagctgcgcaactagccgatacacatgtaatgtaacgtgtctgaaagacagtatgatgaaagagaaccgctactatactgcaggccgtcatttatacaaaaatgttaccgaattgtatcctaactcttctatttggttgacaggtcactcacttggaggatcaatcagttccatgattggattgacctatggtgctcctgctgtgacatttgaggcagtccctgaagctcttcctgtaaatcgactcggaatcccaactcctcctggagcagatccttatcggcccggccaacgagaacacacaggaatatttcactttggtcataatgcagatcctatatttatgggaacctgtaatggtttaacagcttcctgttcatatgctggatttgctttagaaagtgcttgtcataccgggtacgaatgtgtttgggatgttgttaatcaaaactcaacaagagtatctatcttaactcatagaatatattatcttattgataatgtcatcaagaaatggactgcggttccaaaatgtagacttacatctgactgttacgattgtttgttatggaaagaagtctcgtcgaatattagcgagacctcgacctatccttctttgcaaaaattaacgaaaactacaacctag

SEQ ID NO: 13 - DNA, 1761 bp, Golovinomyces orontii
  source 1..1761: mol_type = genomic DNA
atggagtcttcggctcacttgcgacgaaaggacaccacgaaaggaccacctctacgcatcctatcattagatggaggtggagtacgcggttattcgatgctagtaataattcaggaactgatgcatcgaacttatgtcgaaatcaacggcaaagctcctcggaggaatcagatccctaagccggcagaccactttgatctgattatcgggtccggtactggcggtataatagctataatgcttggaagattacgattagacttagaaacctgcatggaactgtatctcagaacttcaaaggatgttttcgaaactgacaaaagaattgcggggatcccgtatacgtcaacgttgttcaaggcctcgagactggaggaatcgatgagagaaggtgttatggaacacaccatctcacagtcggaggggaacgatggctcggagcatcaaccagccagtaaatttcaaactagctccttaaaaggatacaggtaccattctcgtaactcaagtatggcaagcctcagctccagagcgtcacgtaggcactctgaaacaccatttttggctacaaacctagggaacccagatgctttgatgtatgacaaacgagaaaatagaacgaaaacagctgtcacagcaatttaccaaggtacccgtccaggcggccaagcggctcttcttcgatcttacgattcacgaaaggaaccaccctctgaacgtgaatgtacgatatggcaggcaggacgagcaacaacagcttctgttttagccttcaagcctatacaaataggacaatcagtgtttattgatgaaggtgctgggaaatttaatccagcccctgatgctctagaagaagcctgtgtcaatgaatggccctcccgtgaagttggggtttttgtgagcattgggactggaaaaagaaccccaggaagcgaaaaagattctcatctgtggtatgaagattttataggcgaattcgctgatttcagaaggcggctgatgacaaaaattgaggaatgtacaaagatacatgattatatgattcgcgaaggtcttgcaaaatacagagttaatcctgaaaattactatcgattaaatgttgaagttggagtcggagaatttcagatcaatgaatggactcgcattgcagacatcagtacatcaacacatcgctatctagcaagacctgatattcagcgtgtaaacatcggcattgcatccaaactcgcaagaataaatcaggcttcgctacgaaacgagatagatcgagtcaattatgaattaaatgaaaatctagctacggctggtaaaccactaaagattaatcacgaaccctgtcttaacgctgtagaacttccagctgatgaaattccgtataaaacttcgcgcacctcactgggagcgaattttaatggtaaactagaactacaattcccgactccctcaaaaactacaactccacgtcaattacttcgcaatactaacagcttacctaaaaggcgattctcggacgtagcaggtctccctgctggcagttgtaaccccatctcgtccgaaaatgaccgaatcgctatcattaataacgaatattccaaattaagagatctctctataaacaggatagaacctccacctttaccacctaaattatacattgaaaagcctcatgacatgactagaccgctgccaccatatccactagacgatgaaccaccaccggtcgtggataaatcgcggaaaccttcttacaagtatacatga

SEQ ID NO: 14 - DNA, 2193 bp, Golovinomyces orontii
  source 1..2193: mol_type = genomic DNA
atgcagtacgttcggagcataagcggttctgtttcaaagacatggaactctattaatcctgcaactctcagtggtgcaattgatgtgattgtcgtcgaacaggaagatggcaccctcgcgtgctctccctttcatgtgcgctttggaaagttttctcttttacgaccatcagagaagaaagtcgagttcagggtaaatgatgtcaagcaggattttgctatgaagctaggagaagggggagaagcattcttcgtcttcgagactaccgacagcatcccagagtttatgcaaacttctcctcttgtatcacccacttctagtccctcaattcctactggagcttcgggcacggtaaatctctccgagccagattttttagagctcgatacggcagatggtaaatatacatcaggaactccgagtaggccaggcacagctacagtctccgcaagagatatcacaggcaggccacaaagtttaagttattcaaaatctctttctgcttccccagaatttccaaacgagcgactccaccctcgaagctggacagatggcggttcaatacgcacttattcagaaaaatctttgcccttgccgaccacatctgatcgaaatgcagaaaataacagtagcggaagtcacaatcgtttattagctcctagtctgccagaggaagacgggccatatcaagaagaggaagatcgatcccagagtcaaaattctacacactcaagagaagccatagatcgtgctttggcactctctcaaagattatcagcatcaaatattcccactcaggtcactagcacaggagatttaatgttagacatgacaggctataaaagcagtgaggatgatgcattgcgcgctgaggttatcgctcgaaaaattctttccgacgagctcgaagggacctatgatatcggtgcccttatcggtgctgatgaaaatggaaaactttggatatatagcagtgaagaagcgaaagaggcagcaaacaacggttctaatatggcagaggtatctcatcacattgtaagaaacagttacccgaaatctgatctaggttatcacagtgaagaagaagttgagatgccaacacctaaagtcaatattcaccgtagagaagacttcggaattggactagaaacccctcccaagacacctcctgagagagtaggagagaataatcgaaactacgccaagaccctccgcttaacaagtgagcagttgaagtctcttggtttaaagagcggacccaatccagtgagtttcacagtcaacagagcaacgtgtcaggcgaatatgtatctatggcgatacgacgttccgatagttatctctgacattgatggaacgatcacaaagtctgatgctttaggtcacgtactaaacatgatcggtcgtgactggacacatattggtgtggccaaattatacaccgaaatcgtcaacaatgggtataacattatgtatctcacttcgcgctcggttggtcaagccgatacgactcgtgcctatttgaatggtgtggtacaagaatcctatcgtctccccaaaggccccacaattatgagccctgatcgtacgattgcagcacttcggcgtgaattatacattcgtaaacccgaggtcttcaagatggcatgtttgcgtgacataaaaagtcttttcggacagaattgtacaccattctatgctggttttggtaataggtttaccgatgcactttcttaccgctcagttagcatcccaagtaatcgaattttcaccataaattcttacgccgaagtttctcttgatctgctaagtttgaataagttgcgttacagttacgtgaatatgcgagaagtggtagatcattattttccaccagtaaatatgctggttaagtctggtggggaaaaatatacagatttcacctactggagagtacctatacatgatattgaagaattctctgattcggagaatgaagaagaatatattgatgaagatgtcgaagatgaggatgagtgtgacagtttcatttcccgagatttcatggacgaatccaatattgattttgatcttcatattagaagatcacaactaggatctatggaagaggaagagaacgaagagacaacgagcaacactgtagaagataatgagcatgtgcataatcctcaggttcagttcgatgcatcgtga

SEQ ID NO: 15 - DNA, 176 bp, Golovinomyces orontii
  source 1..176: mol_type = genomic DNA
ccttttgattactccgcccaactttttttttttaggttttcagtacttcaccctaggaagctcctcaatcatcatttctgaaaagatgtcatcgtctctagaccaacttaaatccactggaactactattgtctgtgattcaggtgattttgaatcaattggcaaatataaacctc

SEQ ID NO: 16 - DNA, 1518 bp, Golovinomyces orontii
  source 1..1518: mol_type = genomic DNA
atgcccatggatggccttgaagccgggaccattgaactaaaagaaaacactgtaatcatagttctgggtgcatctggtgatttagccaaaaaaaagactttcccagcactctttggcctttaccgcaatcaatttctccccaaggatatcaaaatcgttggatatgctcgaaccaaaatggatcacgaagatttcctcaagcgagtcaaatcttacataaagacccctacaacagatatggaagatcagcttaaagaattttgtcttctttgttcatatgtcgttggccagtatgacaatgacaaatcctttgtgggtctccggaagcatctcgaaagtcttgaagaaggcagaagtgtatcaaatcgagttttctacatggcattaccgcccagtgtatttactagtgtctctcaacagctaaaaaaaaactgctatcctcgcaaaggtattgcaagagttattgtcgaaaagccttttggaaaagatcttgccagttctcgacagctacagagagccctagaacctaactggatagaagatgagatatttcgcatcgatcactatcttggaaaagaaatggtaaagaatatattgattctcagatttggaaatgaatttttcggcgccacatggaatcgaaatcacattgacaacgttcagattactttcaaggagccatttgggactgaaggccgaggaggttattttgatgaatttggcattatcagagatgtcatgcaaaatcatctacttcaagtcttaacgcttcttgctatggaaagaccgatttcattctctgcggaggatgttcgtgatgaaaaggtccgagtcttgcgcggcattcctgcaattgagcctaaaaatgtcataataggacaatacggtaagtctcttgatgggaccaaaccttcatacaaagaagatgaaacagttcccaaagattcaagatgtccaacattctgtgctatggtagcattcattaaaaacgaaaggtgggatggtgttcctttcattcttaaagcaggcaaagccttgaatgaacaaaaaaccgagattagaatacaattcaaggatgtaacgtcagggatttttaaggacataccaaggaatgaacttgttatgcgtattcagcctaatgagagcgtttatatcaagatgaattctaaacttcctggattgagcatgcaaacagttgtgactgagcttgatttaacatatcgacgtcgcttctcggatctaaagattccagaagcctacgagtccttgattctcgatgcaattaagggtgatcattccaactttgtccgtgatgatgaactagatgcgagttggagaatattcacgcctcttttacattatcttgacgacaataaggagattgttccaatggaatatccatatggctctcgcggtccagctgtacttgacgactttacttcctcatacggctacaaattcagtgatacaactggctatcaatggccaatcacccaaactgtgccgaacaagttatag

SEQ ID NO: 17 - DNA, 783 bp, Golovinomyces orontii
  source 1..783: mol_type = genomic DNA
atggccaaacaaccaaatctctttgccttccagactcacgatgctcttattgcaacgctccgagcttacgtaatccagtgccagagcgcaggctttagccgccatggctgtttcaaggtcgcagtctcaggcggctcgcttcccaaaactctagctgcagccctcctctctctacccaaatcagctgaggataccatagatttctccaaatgggaaattttctttgcggatgaacgagctgttccactcaatcatcaagactcaaattatgctctgttgaaagccgagttattggacaagattccagagagccaaggcaaaccaaaggttcacgtgattgatgaatctcaactcaatgatacgcaagagcttgcagaccactacgaacagctcctcgtacgaagttttgcgtcacgggatagtgtaaagttaccgatattcgatcttatcttactgggttgcggtccggatggccatacatgtagtctttttccacgccatcctatactaagggaaacagatgcctgggttgcgcctattgaaaattctcctaagctcccacccaggaggattacactcacactaccggtcgtaactcatgcaatcaaagtagctttcatcgcgacaggaggagataaagcgaaaataatgaagacaatttttgaagatggtcagggcttgccttgtgcaattataaacgaacacgttggggagagatgcagctggtttaccgatgtcgaagcagttgatggagttagtttccctcggaggggtttcttgtaa

SEQ ID NO: 18 - DNA, 1845 bp, Golovinomyces orontii
  source 1..1845: mol_type = genomic DNA
atgcttcagtacgccctccttcaccttgctgggtacaagctttccctggatgatataaaggcgtttcgcactgtggacagcttgactcctggtcatcctgagtcccacgaaactgatggtgttgaagttaccacaggtccattgggacaaggattttctaatgccgtcggtctagcaatcgcccagcaacatgtcgctggtatatacaacaagccagggtttgaacttttcaacaactatacctacactttcttgggtgacggatgcttgatggaaggtgttgcaagtgaagcagcttcattggctggtcatttgcagctaggcaatcttattgccatttatgacgataatggtatctcaattgacggtgacgttaaatgtacttttactgaggatgttgtgaagagatttgaagcttacggatggcataccctggttgtcgaaaatggtgatgatgatttggagggaattgaagatgcaattaaaaagtgtcaggctgtgaagaataagccctcaataattaagttgcgaaccacaattggctacggctcattgctgcaagggacacacggtgttcacggaaatgcgcttaaacaggatgacataaagcaacttaaaactaaatttggctttaaccctgaagaatcatttgtcgttccacaagaagtttatgaattgtacaagtctcgaggcattgagggagctgctaaagaaaaggaatggaccgagtcatttgaacgctatagttcatcttacgaagctgaggctgcggaactaaagcgacgtctaagcggagatcttccaaaagcctgggaaaagaatttgcctacgtattcaccttctgacccagctgttgcttctcgcaagctctctgagatcgttcttcagaaaattcatcaggttttaccagagcttgtcggcggctcagcagacctaacaggctctaacttaacaagatggaaaaatgcaactgattttcagcctccttctctgggattaggtaattggagtgggcgctacataagatatggtgtacgtgaacacgctatgggtgctataatgaatggattagctgcttacggattgataattccctacggtggcacctttttaaattttgtatcctatggcgctggggctgtccgactatctgccctatctcaaactcgtgtcatctgggtagctacacatgactctattggtcttggtgaagatggtccaacccatcagcccattgaggtactgtcacactttcgagcattgccaaattgcatggtctggcgacccgctgatggaaatgaaacgagtgcagcttactatattgcactaacatcgaaaaaaacaccaagcatcctcgcactatctcgacagaatcttcctcagcttgagaactcaaccatcgctaaagcaataaaaggtggttacactctacatgagagtgaaaatgctgatattactcttgtttccacgggatctgaagtttgtatctgtattgatgctgtaaaattacttaaggagaagcacaacttaactgcaagagttgtctccattccatgcttcgagattttcgatgcacaaccaaaagattacaaattaagtgtacttccaaacgggataccatccctttctgtagaggctatgtctacactcggctgggaaagatatactcatgagcaatttggtctaaataggtttggtgcctctggtgcatacaaggatgtctacaagaaatttgagtttacgcccgagggtatcaccaaacgtgcaatttcaacaatcaatttctggaaagacgttcctaatattcggtccccaataaatcgcgctttcgagcagctgatttag

SEQ ID NO: 19 - DNA, 1656 bp, Golovinomyces orontii
  source 1..1656: mol_type = genomic DNA
atggttactgcagataaattaccttcatgggctaaattacaagaatgccaccataatgtgggaaaatcatttgtactcaaggaagaatttaagaaggacccttcccggttccagaaattctcaatgaggtttttaaatgaagctgataactctgagatcctttttgatttcagtaagaacttcatcacagaagacatattgaaaacgttagtacaagttgccaaagaggccaaagtcgaggagcttcgcgatgcaatgttcaacggtgacaaaataaattttactgaagaccgagcggtcctccataccgcactgaggaacatcagtgacaggtctatctttgtggatggacaagatgtaatgcctggagttcgtaaggagttgaagcatatggaggagttcagtaatgcgatcagaagcgggggatggaaaggcttcacaggaaagaacttgactactataatcaatattggtatcgggggatctgacctaggccctgtgatggtaacggaggctctcaagcattatggcgatcgaaatcaaactctccattttgtctcaaacatagatggaactcatcttgcagaagcactccgggattccgatccagaaactacactctttcttgtagcatcaaagactttcaccacagccgaaacaatcaccaatgccagaagtgcaaaggaatggttcatgaacaagactgatggtaaaggtgatgttgccatgcattttattgctctctccacaaatcaatccgaagtcacgaaatttggtattgatgcgaaaaatatgttcggcttcgaaagctgggtcggtggcagatatagcgtatggtctgcgattggcctttcaatagctattcacataggatacgacaacttttataaattccttcaaggtgctcattatatggataaacattttcaagtaacgccactcgagaaaaatattcctgtcattggtggtctcttgagtatttggtactcggatttctacggagctcagacccatctaatctcaccatttgaccaataccttcatcgttttcctgcgtatctccaacaactttctatggagtctaatggcaaggctgtagctcgtagtacaaacgattttctcaagtacactactggcccggttctctttggtgagccggctactaatgctcaacactccttttatcaactccttcaccaagggaccaagcttatccccaccgactttatcctcgcagcccagtctcacaatcctattcagaataattcccatcaaaagattttagcatcaaatttctttgcacaagctgaagctctaatgataggcaaagatgaaacacaactcaaagctgaaaaaacatcggagaatttacttaagcacaagacttttcttggaaatcgtccaaccacatctatccttgcggataagattacaccttccacactaggcgcactaattgtctactatgaacatcttacctttgttgaaggggcaatttgggacataaattgctttgatcagtggggtgttgaattaggtaaaagtcttgcaaaaaagatcctggaagaactggaatcaagtgaagaatctcaagatcatgatagcagtactggtggcttaattgcagaattcaaaaagaaaatggcaaaaatttga

SEQ ID NO: 20 - DNA, 1614 bp, Golovinomyces orontii
  source 1..1614: mol_type = genomic DNA
atgaaagtcgaaaatgaagaaagctctttctttcaagaagttagtgatgtgaagaattggtgggcacagtcaagatggagatacaccaagcgcccttttacagcagagcagatagtagccaaaagaggtaatctaaagattgagtatcctagtaacactcagagcaagaagttatggaacattcttgagcagaggtttgagaatcgagatgctagctatacctatggatgtctcgaaccgactatgttgacccagatggctaagtatttagatactgtctatgtttctggctggcagagctcatctaccgcctcggcatctgacgagcctggcccagatcttgcagattatccttatacaactgtcccaaataaagttggtcatcttttcatggcacaactattccatgatcgcaagcaaagagaagagcgtatttcaaatatgttatctgcagaccacaagattttaacaaacgtggattatcttcgtccaattattgcagacgctgatacaggtcacggaggattaacagctgttatgaaattgacaaaattatttattgaaaaaggtgctgctgggatccatatcgaagaccaagctcctgggactaagaaatgtggccatatggccgggaaagtgctagttccgatcagtgaacacataaatcgtctagttgcgatacgggctcaagctgatatcatgggaactgacttacttgcaattgcaagaacagatgccgaagccgccactctcattactacaacgattgatcctcgtgatcatgcttacattttaggctcaaccaactcaaaaattcaacctctcaatgatctcttacttgcagctcaactggcaggtaaaaaaggcgccgaaatccaagctgtagatgatacatggatatcgcaggcttgcctgaaaacatttaatgaagctgttgttgaggtcatagccactagtatcatgatgaacaaggaagaaatcatcacacacttcttaagtgatgtcaaggataaaagcaataccaaggcaagagtaattgccaagggtatcttaggcgcagatatattttgggattgggatagtccaagaaccagagagggctattaccggttaaagggtggctgtgagtgtgcaataaatagagcagtcgcatatgcaccctatgccgatgcgatatggatggaaagtaagttaccagatataatccaagcagaagagtttgcgaatggtgtacacgctagatatccggaacagaaattggcatataatctttctccatcgttcaattggaaaacagccatgcccagcacagagcaagagacatatattaaaaacctaagcaaactaggctattgctggcagtttataacactggcaggcttgcatactaccgcacttatcagcgacaaattctctcgtgctttcagtactcaaggcatgcgtgcctatggggaacttgtgcaagagcctgaaattgaaaatggaatagatgtggtgaaacatcaaaagtggagcggagcaaactacgtcgacgagttgttgaaaatggttcaaggtggcacctcaagtaccagtgctatgggaaagggggtgactgaggaccagttcaaatag

SEQ ID NO: 21 - DNA, 1629 bp, Golovinomyces orontii
  source 1..1629: mol_type = genomic DNA
atggcaagcaaggaattaaccatcaaaggtatgactgttaccggagctgtgactgatttcaatcgtacaatcattactcaagatgccttaaaattccttgctcttcttcatagatctttcaatggtatacgaaaagaattactccagcgtagagtagttaggcaagaggagcttgataaaagttctctaccggactttcttccagagacgaaacatatacgagaggacgattcatggaaaggtgctaaacctgctcctggtttgattgatcggagagtagaaattacgggacccacggatcgcaagatggttttgaatgctcttaattcagatgtctggacgtacatggctgattttgaagattcaaatgccccgacctgggataatatgattaacggacaggttaatttatatgatgccattcggagaaaaattcatttcaagcaagggcaaaaggaatataaactccggaccgaccgcacattaccaactcttattgttagacctaggggttggcatttagacgaaaaacatataattatcggagaagagcccatttctgggtctctcttcgactttggcttatatttctttcacaattcaaatgagctgattaaacgaggtactgggccgtatttttatctccctaagatagaatcgcatttagaagctcgtctttggaatgatgtctttaatctagctcaagattatctcggtatttcccgtggaacgattcgtgctaccgtactcattgaaactatcctcgccgcttttgaaatggacgaaatcatctatgagcttcgtgatcactcatcaggcctaaactgtggccgatgggattatatttttagcgttataaaaaaattccgtcaacataattcttttgtccttccagatcgttcagctgtgacgatgacagttcctttcatggacgcgtatgtaaagcttttaatccaaacctgtcaccggcgtcaagttcacgcgatgggtggtatggcagctcaaattcccataaaagatgataaatctgcgaatgaaaaggcgatgcaaggcgtctacaatgataagcttcgagaagttaagagtggacatgatgggacatgggttgcccatcctgctctagcatcgattgcatcagatgttttcaatacacacatgccaactcccaaccagatattcgtgcataaaagtaactttacgatcagtcgaaaagatttattaaatatgaacgttggcgggcaagtgacagaggaaggtatccgcagaaacatcaacattggactcggctatatggagggttggctccggggtattgggtgtgttcctatcaattacctaatggaggatgcggctactgcggaagtcagccgatcccaactttggcagtgggtcaaacatggtgttctgactctcgatgggagaagagtggataagccttatacgttaaagctattccaggaggagttagaaaatcttatacgcagaggaccagcggggaataagtaccatttggcagcggagtatttttcaggacagataacaggtgaagcttacgcagaatttctaactacactactttatgatgagatcacgagtgtagttagcccatgtcaggcatcgaatttgtaa

SEQ ID NO: 22 - DNA, 1909 bp, Golovinomyces orontii
  source 1..1909: mol_type = genomic DNA
agaaaaacgtctagtgatgcgtccaagtctatataaaagtgaattaaagattttacaactcattagtgactagatttcatatcctgtaataattctcaactacgtccttttccaatcaaatcaacctacccttcaattgcgattagccaaagttcaaaatgatcacagcctcaagatatactctaagagcgataaaatcatctacaattggcaagaatctgcctaaccatcgaagagagtcgctcactcatgcactgggagaactatcggtcctacatcgtacctttcgatataactcaactgtgtcatgcctaaaaacagtattctctaatcggcttgaagaaaagcgagagctagcgaagaaagtcagagcggtcggagataaaattgtgggaaatgttaaggttgccaatatttacggcggtatgagaggactaacgtcgatgatctgggaaggatctactctagaccctaataaaggaatccgcttccatggacgtactattaaagattgtcaaaagcaattaccgaaaggtaaaagtggtacagaaatgctacccgaagctatgttctggcttctcttgaccggcgaagtgcccactacaagccaaattcgcaagttttcccgtgaacttgctgaaaaagccaaactgcccgtttttgttgaaaaaattttagatggatttcccaaagaagttcatccgatgaatcaatttgcaattgctgtttcagctctttcaacaacctcggaacaggcgaaagcatatgaacaaggatatgacagagcaaaactctggataccagctttcaatgattgtatttctctcctttcaaagctcccaactatagcgggtaaaatatatcaaaataaatatggtagtggtggtgctcagccagccgtcattgactatgaacaagattggtcgtacaattttgcggctatgcttggaaagggaggaaaggaaaatgaagattttcaagatttccttcgcttgtacctcgcacttcatggagatcacgaaggtggtaatgtttcttcacataccacccatttagtcggaagtgctttgagtgatcctttcctcagctacagtgctggtcttcagggtcttgctggtccgctccatggtcttgctgcgcaagaagtgcttcgctggatcctatcgatgcaaaaacaagtggggactaattattctgataacgacatcatccaatttctatgttcaactctcgattctggccaggtcattcctggttacggtcatgctgttcttcgcaaggcagatccccgctttgaggctttaatggaatatgcttcttcacgcccttctattgctgctgaccccgtcttccagttagtgaagaaaaattcagagattgcacctggcattctaagagagaaatgtaggattcaatgtccacatccaaatgttgatgcgtcaagtggcgtcatcttccatcattatggcttccatgaaactttgtactatactgctatatttggtgttagccgagcgttaggagccttggcgcagtatatttgggatcgggctcttagcttaccgatcgagaggccaaagagcataactctcaggggattactagaactagcagagagggcgtagttttcaaactaatatcgaaagaagggtaatttttaaaccaacaaaatgaaataatatcctaatctgattgaatatttcacactagagctctataaaaaaaactctagcacatcaatatggaatatcaaacgctttaagccctactttgtaccttcttggaggcgtctgggaatctaattttttcgttggggggtgtgaaggtctttaatcaaattgttattcacaaatcattcagacctatgtacaagaaaatatcaaagtaaagaaagaagacatgagcgaag

SEQ ID NO: 23 - DNA, 1026 bp, Golovinomyces orontii
  source 1..1026: mol_type = genomic DNA
atgtttgctgcacgaaaactagtgtctgcttctgtagctcagagaagagctttttcagcttctgcgaaagatttatctaaagtcgcaatacttggtgcagctggaggtattggacaaccattatcccttctcctgaagcttaacccccgagttactgatctggctctatatgatatccgcctggcacctggcgttgccgctgacgtaggtcatatcaataccaaaagtacagttaccggatatggaccgacaccaagtgggctctctgacgctctcaaaggcgctgaaattgtgttgattcctgctggtgttccccggaagccaggcatgacccgagatgatctttttaataccaatgccagcattgtccgtgaccttgcaaatgcagtcgctaaatctgctcctaacgcaaacatactcgtcatttcaaacccagtgaacagcactgttcctatatgtgctgaggttctcaagaaagctggtgtgtacaacccaaaacgtctattcggtgtcaccaccctcgatgttgtccgcgcctctcgatttgtatctcagatcaagaatacggatcctgttcatgagaaaataaacgtaattggaggccactctggtcacactattgtccctcttttctctcaaagctcacatcctgatctggtgcaaaatgctgaacttttaaaacgtgtacaatttggtggtgatgaagttgtccaggctaaagatggcaccggatctgcgactctttctatggcaatggcgggtgcgcgttttgcagacagtttattaaaagctgcttcaggacaaaaaggcattgtagaacccgcatttgtcgacagtccgctatttaaagaacaaggagttggattttttgctagctgcgttgaacttggtccccagggaatagaaaaaatccacgacgtcggcaagattgttcccgaagaagagaagttgttagatgtcgctctcactgagttgaagaaaaatatcgctaaaggagtatcatttgttgagaactctgttaaataa

SEQ ID NO: 24 - DNA, 840 bp, Golovinomyces orontii
  source 1..840: mol_type = genomic DNA
atgatggaagaatttttttacggtcatcacgaccttcaaaaaatagctctctatcagccgccgccaccgaaaagagtcgtgtcccggccagagaatgcattatggctcatatacatccacggtggagcatggcgagatccttcgataacagagttaacatttgaacagacagtcaaaactctgctctcaagccgctggatagacagaattaaaggcttcgcctcaatttcctaccgtctctcctcacacccagactataagcaagatcctacaacttttgcaactaaaaaacgagatgctaagcatccggatcatatagaggacgtattagaagcacttgtctttctgcaagataattttcgcgtggggcaacggtacatactcgctggacattcgtgtggtgcaaccttagctttccaaaccataatgagtcagtttgccgtgccaaattttgccaaacccagaggtatcgtaggtcttgctggaatctacaacttgcgtggtttacgcgatagaaaatccgatgagacgtaccacacatttcttacaggagcattcggcgagaacgaggcagaatgggaatccgcatctcctgtcaatatcgttccttcggaaaatccgtggcccaacggtcgattagtgatactggcatcttctactatggatgaggccgttgatgcagaacaaattgatgaaatggcaaaaactctggaaggctatgatgggctcaagatcgatacttggaaacaaatactccattgctctcatgatgagatatggtctagtgatggactagcagaggtattggaaagagttctcgatgtctactttcttagatga

SEQ ID NO: 25 - DNA, 2355 bp, Golovinomyces orontii
  source 1..2355: mol_type = genomic DNA
atgttggcatcacgacaggcgtactgtctcgtcccacgacgagcgcttcctttgcgaggcgttcgtcgtatgtctaatgtgggtgactcttctctggataagaaagtaagacaaaataatagagaaccaaacaacttcatcaattacaaacaaatgtctgagaaacttgccattgttcgctcaagacttaatcgtccacttacatacgccgagaagatagtctactcacatctcgatgatcctcatggacaagaaattgaacgtggtgtctcttacttaaaacttcgacctgacagagttgcctgtcaggatgcaacagcacaaatggccatcttacaattcatgtccgctcgtatgccttccgttgccaatccaacaaccgttcactgtgatcacttgatagaggcacaagctggtggaaagaaagatttagccagagcacaagatatcaacaaagaagtctacgaatttctctctagctcatgtgccaaattcaacataggtttctggaaacctggctctggcatcatccatcaaatcttactggagaattacgcattccctggtggtcttctaattggaacagattcacacacaccaaatgctggtggtttaggcatgtgtgcgattggcgttggtggagctgatgctgtagacgttatggctaacatcccatgggagctaaaggcaccaaaaattattggcataaagcttaccggtcaactctctggctggagctcacccaaagatatcatactaaaagtagccgatattttaacggttaagggtggcactggcgcaatcgtagaatactttggtccaggagttgattccatatcagcaactggaatgggcacaatctgtaatatgggtgcagaaatcggtgcaacaacctctctatttccatttaacgaaagaatgtatgattatttagcggctactaaccgttcagaaattggcgacttctgtcgtgtgtactcaaaggaacttaaagcagatgataatgcagaatacgaccaatttatcgaaatcaacctctccgaactggaacctcatatcaacggtccattcacgcccgatcttgcgactccaatttctaagttcagtgaagctgtgaagaagaacaactggccagaagagcttaaagtcggtttaattggctcctgcactaactcctcatatgaagacatgtctcgctcagcctcagttgccggtgatgcaattaaacatggtctcaaagcaaaatctttgttcacggttactcccggctcagaacagatacgtgcgacaattgagcgtgatggccagttaaatacatttgaggaattcggtggagtagttcttgctaacgcctgtgggccatgtataggacaatgggatcgtcaagatgtaaagaaaggaacacctaattccattatttcatcctacaatcgtaatttcacaggtcgcaatgatgctaatcccgctactcattctttcatcgcatcacctgaaattgttgtggcaatgacagtggcaggatctctccattttaaccctttgaaggataaactaacaggaaaagatggtaaagagttccttctatctcccccatcaggtgaaggtctcccttcaaaaggctatgatccgggacaagaaacatatcaagcacctcctagttcaggagaattagttgaggttatagtctctcctacaagtgatcggctacagattctcgagccatttaagccatggaatggaaaagatgcacttggtctccctatcctcattaaggccaaaggaaaaactaccaccgaccacatttcaatggctggcccatggcttaaataccgtggacacttagataatatatcaaacaacatgctcattggtgctatcaatgaaatgaatagtgaggcgaataaggttaagaactttactactggcgaatttgacgctgtcccggcgacagctagagactataaaaagaaaggcataccatgggttgtgataggtgactggaattatggtgaaggatcatcaagagagcatgctgctctcgaacctagacatctaggtggccttgcaattatcacaaaatcatttgctcgtatccatgagacaaatttgaaaaagcaaggcatgctcccattgacgttcatcaatcctgaagattacgataaaatcaaacctgaagacaaagttgacctaatgtgtactgagctaagcgttgggaagccaataactctaagagtacaccccaaaaacggagacagatttaacgtaaaattggctcatacatttaatgagccccaaatcgaatggttcaaaaatgggtctgctcttaacacaatggcaaagagtaataagttataa

SEQ ID NO: 26 - DNA, 1998 bp, Golovinomyces orontii
  source 1..1998: mol_type = genomic DNA
atgcctcccgcttcaaaacaaggacctgccactcccaatcagctatctaacgatgggcagacagcgaatgacaatatccgccgatttgctgcaccaagtcgtcctttaagcccctacgctgcacacactttgttccacaacaagacgagatgtttcgtatacggccttcaaccaagggctgttcagggaatgcttgattttgactttatttgcaaaaggacgagtccatccgttgcaggaattatctatactttcggcgggcagtttgtcagcaagatgtactggggaacaagtgaaactcttctcccagtctaccaagatgtcgaaaaagctatggccaagcactcagatgttgataccatcgtcaactttgcttcatctcgcagtgtgtattcgtcaacaatggagttaatggaatatccccaaataaagtctatagcaattatcgccgaaggtgttccagagaggcgtgcgagagagatattacatgtagccaagaaaaagaaaatcacaatcattggtcctgcaacagtaggcggtattaagcctggctctttcaagatcggaaacactggtggtatgatggataatatcgttgcctcaaaactttatcgcaaaggatccgtcgggtacgtttctaagtcaggaggtatgtcaaatgaattgaataacattatcgccaataatacagatggggtactcgagggtgtagcaattggcggagatagatatccaggcacaacattcatcgaccatttactacgatatgaagcagacccggactgtaagatactcatgctactcggtgaggtcggtggagttgaagaatacagagtcattgaggctgtaaagtctggactcataaagaagccaatagtcgcatgggcaattggtacgtgtgctagcatgttcaaaactgaagttcaattcggacacgctggatcattcgcaaattctcaacttgaaactgcagatgtcaaaaacaaatcaatgcgagaggccggtttccacgtccctcaaacattcgaggaacttccagacctcctagcttctgtatatcaaaagctagtgaaaaatggtaccataaatccacaacctgagcctgctgttcctaaaatacctcttgactactcatgggctcaagaattagggttgattcggaaacctgctgctttcatatctactatatctgacgaccgaggacaagaactcctctacgcaggaatgcctatttcagacgtttttaaggaggatatcggaattggaggtgttatgtctctactctggttccgtcgtcgtctccctgaatatgctagcaaatttctggaaatggttcttatgctgactgctgaccacggtcctgccgtatctggtgcaatgaacaccataattacgacgcgtgccggaaaagatctaattagtgctctcgttagtggacttttaactattggatccaggtttggaggtgctcttgacggtgcagctgaggagtttacaagagcatttgacaaggggttgagtccacgggatttcgtcgatacaatgcgcaagcaaaacaaattaatacccggtattggtcacaaggttaagtcacgcaacaatcccgatcttcgcgttgagcttgttaaagaattcgtgaaaaagagatttcctacatgcaagatgctcgaatatgctcttgcagttgaatcagtcacgacatcaaagaaggataacctcattttaaacgtcgatggcgtagttgctgtatgttttgtcgacttaatgcgtaactgcggtgccttcagcgctgaagaggcagaagattacttaaaaatgggtgtacttaatggcctttttgttcttggcagaagtattggtttgattgctcattatcttgatcaaaagaggctgcgtactggcctttaccgtcatccttgggatgatatcacttacctgcttccaagtttgggttccggaggccttggaagtgaaggacgtgttgaggttcagatgtag

SEQ ID NO: 27 - DNA, 987 bp, Golovinomyces orontii
  source 1..987: mol_type = genomic DNA
atgattaatcagaatacgtcaggcccacaaaattctaagaagcctacatctattgccacaaacttcatcgcaggcggtgcagctggtatgacagaagcattgctatgccatccactagacaccataaaagtacgcatgcaactttcacgtcggtcctacgctcagggtaccaaaaaacatggcttcatcgctacgggtactgcaatcgtaaagcgagaaactgcacttggactgtataaaggtcttggagctgtaatgactgggattgtaccaaagatggccattcgattcaccagtttcgaggcctataaaagatggctatccaataaaaatgctgctaccgtatctagtcaagcagtatttatggccggtttagcagctggcgtgacagaagcagtagccgtggtaacaccaatggaagtcctgaagatacgtctacaagctcaaaatcatagtatggctgacccacttgatgttccaaagtatcgcaatgcagcccatgctctctatacagtacttaaagaagaagggccatctgctctttatcgtggtgtatctctaactgcactgcgtcagggctctaatcaagctgtaaactttacaacttatggctacttgaaagataaacttcaaacacaccagtccactctcaagacttcctccagcgactttagctccgtcaaatctaataatcttccggcttatcaaacaacactgattggacttgtatctggtgctctaggtcccttttcaaatgcgcctattgataccataaagacccggctccaaaagactcctgtagaccgaggcaatggagcgttggtgcgtatagttttaatagctcatgaaatgtggcagcgagagggtatgcgatcattttataaagtggcgcccggtcaggcaatcacattcactgtatatgaggctctgaaagagcttctagaagggaaaaatagtaccattgaagcaggtaaatatgaagaatag

SEQ ID NO: 28 - DNA, 864 bp, Golovinomyces orontii
  source 1..864: mol_type = genomic DNA
atgcacaaggaaaacgtagtgtatccgttctggtttggagggagcgcaagtggtttcgcagcttgtatctcgcatcctttggacttggttaaggtccgtttacaaacacaatgtggaaatacccacaaaacgatggtcggagcctttagccaaatattaagaagagatggactttttggcctttaccagggtctctcagcctcacttctccgccaggctacctactctactactcgatttggtatatatgaagatatcaaatctagattttcgcctcaagatagccatatgccaactctagtggcaatggcatcgatatctgggttcctaggaggaatagctgggaatcctgcagatgtcttgagtgtacggatgcagcatgatgctgcactacctctggctcagcgtagaaattatagacaccccatagacggattagttcggatgacaagagaggaaggctggagatgtcttttcagaggcatatggcccaacagtattagagcgtcattgatgaccgcaggacaactagcctcatacgatagttttaagaggtttctcatttctcgaatcgcactcgaagataatctcacaactcactttactgcctcattatttgctggattcatcgccacttccgtttgtagcccagttgatgttatcaaaacacgcataatgtgttctgctgagactaaaagtttagcgagatttatggtcgatgtgtaccgtaccgaaggggtaagctggatattccgaggctggctaccaagctttgcacgcctagggccacacacaatagctactttcttgtttcttgaacaacataaaaaaatttataggaattatcgaggattcaacgaataa

SEQ ID NO: 29 - DNA, 3579 bp, Golovinomyces orontii
  source 1..3579: mol_type = genomic DNA
atggcggccgaccatggacccaatggggcctacaccgaggtcttcgaagagggcatagacattgtccagccccaaacaatccacaggattcgagcaaactcttctattatgcagttaaaaaaaatccttgtcgctaatagaggtgaaattcctatccggatcttccgaacagcgcatgaactttcgctacaaactgtggccgtttacagttatgaagatagattggggatgcaccgacaaaaggccgatgaagcttacatgatcggaacacacggacagtatacacctgtaggagcttatctagctggcgatgagattatcaagattgcagtgcaacatggtgtacagatgattcatcctggttatggcttcctttctgagaatgctgaattcgctcgaaatgtcgaaaaagctggtcttattttcgttgggccctctcctagggtcattgaggcacttggagataaagtttcggcgcgagccctagccataaaagccggggtacccgttgtaccgggtactgagggtgctgttgagaaattcgaggaagttaagaagttcactgatgaatacggtttccctatcatcatcaaggcggcctatggtggcggtggtcgtggtatgcgtgtggtaaggaaccaagagtcattgaaagattcttttgaaagggctacctctgaagctaaagcggcattcggtaacgggactgtatttgtggaaagatttctcgacaagcccaagcatattgaggtacaattattgggtgatagccaaggaaatatagtccatctctatgaacgtgactgctctgtacagcgaagacatcagaaggttgttgaattagccccggcaaaggatttaccccaagatgttcgggataatctgcttgaagattcggtaaaattagctaaatctgtcaactatcgcaatgcaggaaccgctgagttcttggtcgaccagcagaaccgttattatttcattgagatcaatcctcggattcaagttgagcacactattaccgaagagattacaggtattgatataattgctgctcaaattcagatagcggctggtgccactctagctcagcttggacttacccaggatcgtatttctactagagggtttgcaatccaatgccgtatcaccaccgaagatccttctacagggttttctcctgatacaggaaagattgaagtatatagatctgccggtggaaatggagttcgcctagatggaggcaatggatttgccggagccatcatcagtcctcattatgattctatgcttgttaagtgcacttgtctgggctctacttacgaaatagtgcgaaggaaaatgcttcgtgcattggttgaattccgtattagaggtgtcaagactaacatcccttttctcgcttctcttcttacgcaccccacatttatctcaggcgattgctggacgacgttcatcgatgatacgcctgctctatttgatctagtcggtagtcaaaatcgaggccaaaagcttttggcatatttgggagacgttgcggtaaatggaagcagtataaagggacaaattggtgaacccaaactcaagtctcagattataattcccaagatatttaaggagaatggtaatatcattgatacttcgataccttgccaaaaaggttggagaaatataattcttgagaaaggtccagaagcctttgccaaagcagtccgccagaataaaagctgtctactcatggataccacttggcgtgacgctcatcaatcgttattagctactcgtgtccgtaccatagaccttcttaatattgcaaaagaaactagttatgcttacagcgatctatattcccttgaatgttggggtggagcgacatttgatgttgcaatgcgtttcctatacgaggatccttgggatagactccggaagatgcggaaggctgtcccaaatatcccatttcaaatgcttcttcgtggtgctaatggagtggcctactcatcgctaccggacaacgcaatctatcacttttgcgagcaagcaaaaaagcatggtgtcgatatttttcgagtatttgatgcattgaatgatattgatcaacttgaggttggaatcaaggcagtacaaaagacaggtggtgttgtagagggtactatttgctacagcggtgattttttgaacccaaagaagaaatacaatctcaagtattacatgaatcttgttgaaaaactagtcgcccttaacattcatattttagggatcaaagacatggcaggtgttctgaaaccaaaggcagctacattactaattggaacgattcgagaaaaatatccggatctccctattcacgttcatacccacgattctgctggcactggtgtcgcttccatgattgcttgtgccaatgctggcgcagatgttgtggatacagcaactgacagcctttctgggatgacctctcaacctagtgtgggtgccgtgtatgcttcgcttgagggaactgatttatgtcctagccttgatattcgtaacatcagggcaattgatacatactgggcacaactccgtctgctgtattcaccatttgaggctggactaaccgggcccgatcctgaagtttacgagcatgaaatcccaggaggacagctaaccaatatgatgttccaggcctctcagctaggtcttggagcgcaatgggctgaaactaagaaggcttatgagcacgcaaatgaattactgggtgatattgtcaaagtcactcccacatcaaaagttgttggtgatttagctcagtttatggtctccaacaaacttagtataaatgatgtaaaggaaaaggccggggaattagattttccagaatctgtttacgagtttcttgaaggtcttatgggccaaccttatggtggattccctgaaccacttagaactaacgcactccgtggcagacgaaagcttgacaagcgtcctggcttgacgcttgaaccacttgatcttgcaaagataaagcaggatatatacaacaaatatggcagtgtaacggaatgtgatgttgctagttacgccatgtatccgaaggtctttgaggaatatcgtaactttatcgagaagtatggcgatttgagcgttttgccgactaagtattttctgtcaaaaccagagattggacaggaattccacgtggaacttgaaaagggaaaagtgctaattcttaaactcctcgccgttgggccaatttctgacactactggtcaaagggaggtattttatgagatgaacggagaagttcgcgtggttacgattgacgataaaaacgcggccgtagagaacacgagtagaactaaagctgatccgggtgacagtagtcaggtgggcgcaccaatgggtggcgttgttgtcgagatacgcgtcaaagacggtggagaggtaaagaaaggtgatccgattgccgtgcttagcgcgatgaagatggaaatggttatctcagcgccacatgctggcaaaatagctaacatacaagttaaagagggggattccgtaggaggtgccgatcttatctgccgaattgtccggccgcacgagtag

SEQ ID NO: 30 - DNA, 1584 bp, Golovinomyces orontii
  source 1..1584: mol_type = genomic DNA
atggttacttcatccggtgtcaatagaactgctctccatccaggtgaatggcctccagtaaaagaacatactgagctagaagaagagctccatcatacagctcatatcgactatgatcgagtagctattatacctaacccaagtgttgctgctctttacgaggatgctcttgtctacgaaacaggctctgccattacgtcaactggtgccctcacggcatactcaggagtgaagacgggtcgctctccgtctgacaaacgaattgtcaaagagccaagctcagagaacgaaatttggtggggaactgtttggcggattaatcgagaacgtgcaattgattatttaaacaccaggaacagaatctacgtcattgatggctatgttggatgggataagagatatcaggtcaaagttcaaatagtctgtgctcgcgcttatcacgctcttttcatgcgcaacatgatgattagacctgatcgtaaagatttggaacattttcatcccgaatacactatttacaatgcaggctctttcccagcgaacagatatacagagggcatgacctcaggtacctccgttgctataaattttgccgagaaggagatggttattctgggaacagagtacgccggagaaatgaaaaaaggtatttttacaatgcttttctatgagatgcctatcaagcacaatattctcacgctacattcttctgcaaatgaagggaaaaatggtgatgttactgtgtttttcggcctttccgggactggtaagaccacactgtcagcagatatcaatcggtatctaatcggtgacgatgaacactgttggagcggctgttatgctaaatgtatcggcttgacagctcagaaagaacccgatatctttaacgcgattaagtttgggtctgtccttgagaatgtcgtcttcgaccctgaaactcgtcatgtggactacgaagacgtgacactaacggaaaacactcgttgcgcatatccaatcgagtatatttctaatgccaagatcccatgtctatcgatgaaccatcccagtaatattattcttttgacttgcgacgcttgcggtgtacttccacctatatccaagcttaactcggctcagataatgtttcattttatctctggatatacatcaaaaatggctgcaacgttttcttcctgctttgctcagccgttcttagcacttcaccctatgcgctatgctaagatgttagctgagaaaattgagcttcattcagcaaatgcttggtttttaaatactggttggattggtgcgggagcgacagctggtggccagcgttgtccattaaaatatacccgtgccatactagactcaattcactctggagagttggccaaggaagagtatgagacgtatgaaacattcaatcttcaaattccaaatcatctactaaacccgagaaatgcatggactgccggccatgaaagttttgccgttgaagttgagaagcttggtgcgctgtttaatcaaaatttccagaaatatgcagatcaggccacggaagatgtgaaagctgcgggaccaattttaaagacgaaacagtag

SEQ ID NO: 31 - DNA, 1113 bp, Golovinomyces orontii
  source 1..1113: mol_type = genomic DNA
atgatagcgggccccagcttaatctccaaccatggaattcttcaaaaatatatgaatctcgatcagaaaggctctgccatagctgaatacatctggattgactcgactggtggagttcgatccaagtcaaggactcttacaaatattcccgagagcggcaaattcgaagtcaaagaccttccagaatggaacttcgatggcagttccaccggccaggcgcctggtggaaattctgatgtttatatcaggcctgtagctgtctacccagatccatttcgaggtagtcctaatatcctagttcttaccgaatgctggaactctgatggaacccctaacaaatttaatcaccgacaccgaactcagaagctcatggagactcataaagctcaaaaaccatggttcggactcgaacaagaatacacgttacttgactctttcgatagaccttatggatggccagtgggaggctttccaggaccccaaggaccatactactgcggagtcggaagtgggaaagtgtactgcagagacatagtcgaagctcattacaaggcgtgtttgtacgcaggtatcaaaatttctggcactaacgccgaggttatgcctgcacagtgggagttccaagttggtccatgcgagggcattgaacagggagaccaactctgggttgctcgtttccttcttcatcgtattgccgaggaatttggtgccaagataacgttccatccaaagcctatccatggcgattggaacggagctggtctacacgcaaatttctcctctgaagacatgcggaaacccggaggtatgaaaaaaattgaagaagccatggtaaaactagaagccaagcacaaacagcacatcgatgtctacggagaagataacaccatgcgtttgacaggtcgccatgagactggtgatattaaccgcttcacatacggcgtcgcaaatcgaggcacatctgtacgtattcctcgagatgttagcagaatcggttacggttactttgaggatcgacgacctgcgtcgaatgcagatccataccaaattactggcatactgatggagacgatttttggtaatactacggaggggaaagaagaaaattcataa

SEQ ID NO: 32 - DNA, 1291 bp, Golovinomyces orontii
  source 1..1291: mol_type = genomic DNA
ggttcatcacctctaaatttgtgaagaggtttctaaaagattcatctcatctcatagccagaatttagacgctgtataaacgatgtttgggtcaggatgtccgatcagaatgtatccaagagtcaagcgtaaattctgcaggctagatgtatttcgtcccatcatgaatcgtagatacaaaagcggaccttttggctatacgatggcacaggcgctcgtttacatgaagcatggtgaaccagacgatgtactctctcttcatcgtcactccattacacctacacttccaccagattctattttcttacggacacttgcaagcccaatcaatccagccgatatcaaccaaattcaaggtgtctatccgttaaaaccagaattctcgcctctacttggtacaccgcttccgagcgctgtaggtgggaatgaaggctgttttgaagttgtttcactcggctcttcagtgactgatgttaagaaaggcgactgggtggtggcaaatacccctgcactcggcacctggcgtacgcatttggttgtacagaagtctgatattttgcccgtagagaaaaaagggttaaccgcaacacaagtttgtactgcatcgatcaatccgcgaacagcttactgcatgttgaataacattgagaaactgcagaaaggtgattggtggattcaaaatggagccaacagtagcgtgggtcgtgccgcaattcaattgggaaagttatggggctttaaatcaataaatgtcattagagatcgaccagacgtggtatctaccgagtccttgcgggctgaattgttagaattaggtgctacacatgttgtcacagaaacagagctgcttgacagaggctttcgagagctcgtgacgaaatggactaatgataataataagggaattagattaggcttgaactgtgttgggggtaagtctacaacggcattggtaaaattactcgggaaaagaggtcatttaatcacatatggtggcatgtctcgacaacctctacaacttccaaccagccgcctcatatttgatgatctacgttttagtggcttctggattagtcgctggtccgtcgataatcctcgggaaagtcagcacatgctcaacaaagttctggacctcattcgtacaggttctttgaaggaaactcctcatcacgaaatactctggaattgggatactaagattcaagtactcaatgaaggaattaaaggtgcacttcagggttatcgaaacgccaaaaatattcttgtttacggagatacataaattttgagt

SEQ ID NO: 33 - DNA, 1467 bp, Golovinomyces orontii
  source 1..1467: mol_type = genomic DNA
atggccgccaaatcgatacttgaggccgatggaaaggctatcttaaactaccacttgacgcgagctcctgtcatgaaaccatcacctcttccaccatcatctacacataatccacccccaaagcttgcgtccctctattttcctcacgatgcagatacgtcggccatactcgagcaagccgagcgttcttatccatggctactaacacccggttctaagtttgttgcaaaacctgaccagttgatcaaaagacgaggcaagagtggtctgttagcactaaataagacctggcctgaagctaaagcgtggattgccgcacgcgcgggaaaacctcagcaagtagaatccgttgttggtgtgctcagacagttcctagttgaaccatttgtaccacatccccaaggaaccgaatactacatcaacatcaactcacagagagagggtgattgggtactctttacgcacgaaggtggcgttgatgttggtgatgtcgacgctaaagctgaaaagatcctcatccctgtcgatctttctgaatacccatcaaatgaagccattgcagagggtcttctcaaaaaagttccaaagggtgttcataacgttctcatagattttatcaccagactatacgctgtatatgttgactgtcaattcacataccttgagataaatccacttgtagttatcccaaatgataaaggaacctcagcggatattcatttcttagatttggctgctaagcttgatcaaactgcggagtttgaatgtggagttaaatgggcaattgcacgctctccagctgcattagggatgatagctatgaagcaaggtgaagacaaagtaactattgatgccggaccaccgatcgaattccccgcaccttttggacgagaactgagcaaggaagaggcatatatcgccgagcttgatgccaaaactggtgcatcgttgaaactaacaatcttaaatcctaaaggacggatctggacattagttgctggtggtggtgcctcggttgtttacgctgacgctatagctagctgtggatttgccgatgaacttgctaactatggagaatattccggagcgccaactgaaacacagacattttactacacccgaacagtccttgatcttctactcaaagcaccccttcaacccaacggtaaggttttgtttattggtggtggtatcgcaaactttacaaacgttgcatcaacatttaagggcgtgattagagctctacgagaggttgctcctggtcttattgaacacaatgttcaaatctgggtaagaagagctggtcccaattatcaagaagggttgaaaaatataaagtatgtcggacaagagttaaaactaaaaatgcacgtatacggacccgagatgcacgtcagtgggatcgtaccattggccctgataccgggccgtttcgaaaaatgttctattgaggagtttaaaggctaa

SEQ ID NO: 34 - DNA, 1989 bp, Golovinomyces orontii
  source 1..1989: mol_type = genomic DNA
atggttgattcgctaaccacatcttcagttcctgatatcgctgaatctcatgtctcagagcctccccaaattatgttttcaaaacacccgagcaagcctcatctgagtggtctgagtgaataccgtgagctacatcacgaatcaatcacaaagcccaatcaattctggggaaggttggccaggaaactgcttagttggaaaagagactttcagactgtccactcgggcagcttattgaatggagagaattcttggttctgcgagggtgagttgaacgcgtcttacaactgcgtcgatcgacatgctgtcaaaaatcctgaaaagccagccattatcttcgaggccgatgagaccagtgacagccgaattattacctatggagaactcttgaagcaagtttgtaaaacagctcatgtgcttagacagctgggtgtgaaaaaaggtgatacggtctctatttaccttcctatgatcccagaggcggctattgcaattttagcttgcactcgtattggtgctattcattcagtgatatttgccgggttctcttcaagttcaatagccgatcgaatcatcgatgcgaaatcaagaattgtcattacttcaaatgagggagttcgtggtggtaagcctatagctaccaaatatcatgtggatgaggcgttaaagctttgtcctcatgtgactcactgcctcatctttcgaaggacgagtatggatattccttggacaccggggagagacttctggtggcatgaggaagccgagaacgctccttcttatcttgatcccgtatccatgagctctgaagatccgcttttccttctctacacgtctggatcgactgggaagcccaagggaatcgttcactcgaccgcaggttatctggtgggtgcggcagcgacgggaaagtacgtctttgatatccacgactcagacagggttttctgtgccggagatgtcggatggatcacgggacatacctatgtcatctatgcacctttactcctaggcgttgctactgttatcttcgaaggaactccggtctatccaactccctccaggtattgggaagtgatttataagtatgagatcactcacttttacgtcgctcccacggctttgagagtcctcaaacgatcaggtgaccatcttgttaagccaaatggtacacacctacgagttctcggttccgttggtgagccgatctcagcagatgtgtggcagtggtactacgaaatcgttgggaaatcagagacacatgtcattgacacttactggcaaactgagacaggctcccatgccattgcaccactagctggtgttactcccactaagccaggctctgcgactcttccattctttggaattgaaccggccatcatcgacgccatttccggggaagaaatccatgatatcaacagggaaggagttttgggtttcaaacaaccatggccgagcatggcacgtacaatctggggtgatcacaaccggtatctgaatacgtatttgaatgtgttcaaaggatattatgcaagtttccaaactgatttcttagtccaatacccccctgacacacgacgtgataaagatggctactactggatctgtggtcgtgttgatgatgtaattaatgtttcgggtcaccgtatatctactgctgagattgaagctgccctaattttacaccaggctgtggttgatgccgcggcagtaggtattagcgacgaaattactggtcaggctattgtagcttttgtttcaatcaagaccggtagtgaacatccggaattattaaaggacttaatttcacaagtgcgaaaatcaattgggccatttgcagcccccaaaaaaatttacatagtaccagatctaccaaagaccaggagcgggaagattatgaggcaagaggatgaattaggtgacatctcgacgctttctaatccgtctattgttgaaataattatcagacatgttcgcggaatataa

SEQ ID NO: 35 - DNA, 697 bp, Golovinomyces orontii
  source 1..697: mol_type = genomic DNA
cgattgtctctcttctctctacccattaacactgacactttccgccctttactccaatgcttccatagcgttgacaggggtcgcatcgcattcaccctcgatatctttagcagttcatggaatctctccaaccgttattgtggcttctagccatactatgtttaaattctacgaagagacaaaagggaagctatcatctccgttattcaagcttacatacttgcttgaaactcgcgatttaattaccaatggagtcatgccagttacttccgttttctcgagcatctttgacagatggcgtcctactattggtattactccgggaaaattacgcctcatatacatgtctacactcgcggggacaaaagacccaattactgtttcaatactctcagacttgagaattctcaccaggtctcgtattattcatgctctaacagccccaaaagttgctggagctgtagctcagacaggggtgtacgattatcggatcagtcataattgtagtacatcacattttggaccgcctatgtcaagtgtagaaattttctttcaggacaaagatgtttttaaaagtagaggcaatttagcaatgggtgaattaaatgtagccgggcccgctgtcgtgggcgagaaagccagcctaggggtatttggtatgatgaatggtgataatacgctgagcataatatcatag

SEQ ID NO: 36 - DNA, 1605 bp, Golovinomyces orontii
  source 1..1605: mol_type = genomic DNA
atggttcaagccactggagcggctatagttgccggcacggtattgactggcatgtatgcggaagcgaagcttgccttgtataaggatttgataactttgaaaaacatcaaggaatcagagcaaaaatttaacgatgcagccaagaaagatcgaacgtctctctactacctttttgaggaatctgtattccggagatccaatgacgaatgcatatggtctcgcgaaggcatctatagctggtcccaagtctataaaaaagttaatcagtatggaaactggtttctttcgcaaagcgttcatgctggtgattatgtagcgctttatctgacaaattcgcctgatttcatgtgtgtctggctcgggcttctttcaattggtgcagccccagtactaatcaacaccaatcttacgggaaacgcattattacattgtcttaaaatcagctctgcaaagattctgttagaggatgaggatgagggagtcagagaacgggttgaatcaactagagaaaggattaataaagaaattggcatcaccattataacattactgaaggaaactaaaaatgagatatatcaattcgaatcaaaaagacctgatgactcatataggtcaaacacaaagggtgatacaccactggccctattttatacgagtggtacaactggctttccaaaagctattccgatcaatgtacaacgtggttatcactggattaataaacggctccgtcattgcgattgggaaaaattcagcactactaatttctggcgcgatatccacgattcccaagcaacatggttatgttatgtcggagagattgctcggtatcttctcttagcacctcctagctctttggacactggtcataatgtcaaaggcgtttttggaatggattacgcccagatttcatcagaaggcgtatttacagtaaccaacaattgtagaggtgattatctggccaaagctgtggggcatcacggtgctctttttcgcttccttacccgaaacacaattgttccggtattaattgacactgtcactggtgatatctttgcgtatcgtcaaccgtacgagaaaggcggtgagatcattgtgaaagcagttgatactaatgtatttcctgggtatagaggtgatgataaagccacagagaagaaattcgctcatgatgtattccagaagggcgacctatggtaccgtacaggtgatgctctcagaagaacaactgatggtagatggttttttatggatcgactaggggacacctatagatggaaaggagagaatgtaagtaccgcagaggtagccgaaactctcggtcagtatcctggtatcgttcaggcgaatgtctatggtatttctctaccaaatcatgatgggaaagtcggttgtgcagccatttacatcgatcccaaactcagagacgcattcgacttctcggattttttccaagaagaaggagtagatccagaaaaagttgcaagccaagatgaaatattatggatagggagagatgagaaaggtcttacatacataaaatttcatccaaacgactggaataacttaaacatggtaagagccgattatgaaacagaaatttag

SEQ ID NO: 37 - DNA, 1305 bp, Golovinomyces orontii
  source 1..1305: mol_type = genomic DNA
atgttttcagatatattcttctctaagcccccgagcgatatcttgacattccgactggattttgaaccagaaactttgcacccaccgagcggctcaacgcctttccacatcccaccagaaatctacacacttgcactcgacatccgagttcctgcaacaattgctatctcatatttatgtttggtctacttactcaatagaaaaaatattaaaaatcataatcagccatggtctatctcgaaatacaaaatattcactatttttgttttcatacacaatttatttttaactctgtactctggctggacctttataggaatgttgggaacaattcaaagatcagtttcctctccgtatagcaatgatggacttgtgggcacggtagattctctatgcaaaattcatggccctcgtggtcttggtaaatctgtcatatacaacaccacaatttcccaatgggcgcctcaaacaccctcactctattttaatgagagtggaattttagatttgacaagtcctggacgcatgtggaacgaaggcttagcattctatggctggcttttttatttgtcaaaattttacgaagtactagatactcttataatcatagtaaaaggaaagaaaagtggtgccttgcagacatttcatcacgccggtgctatgttttgcatgtggtctggtattcgattcatgagccctcctatctggatgtttgtatttataaacagcgcaattcacacgttgatgtatttttactacaccctaaccgctctcaaattacctgtatctcaatacttaaagaagcttcttaccctactccagattgcacaattagctgtcggaacatgttacgctgccattcattcatttattaattatctctatctcacggaaattccaatcatcgtatcgataattgatgattctgcttcggctaccgctcctcctctcagcagctcaacaaccgctccgaattatttagcccaggtgataaaaaagctgctaatattttctataggtggctctgatctagtgaaaaccgagacaccacagcctaaatacattaaaaacatatcatacagtactgtgaagcattatgtaacctgtctcgacactagcgggcaaaaatttgccatatggttaaacatcctttatttaatccctctaataggcctattcctgaatttcttttccaaatcttacaagtcaaaaaataccaaggctaggtctgtgggagagattgaatttgttaaaactctcccggtagagaaagaatcaattaaaacaaatgaaaataaaaaataa

SEQ ID NO: 38 - DNA, 1353 bp, Golovinomyces orontii
  source 1..1353: mol_type = genomic DNA
atggagaaacaaccgcacgtcgacctcaatggcaaaccattcgagttgtctaattttaccatgaaagagatatacgacgccatccctccgcattgcttcaagccctcgacaattcgctcattggcctatgtagtgcgtgactacctttacctcagcacactagtttacctcgctgtcacatacattccttcgattccttatgctccccttcgtttcctggcttggactgcgtacacaattcttcagggtttcgtctttacgggtatctggattctcgctcacgaatgtggtcatggagcgttctctaaatcaaagaaacttaattggacacttggcctcattttacactcttttctactcgtccccttccactcctggcgtatcactcactcccaacatcacaaaggtacggggaaccttgaacgagataccgctttcgtgccgagtcatcgagaggattggatcaaggccaagctgggcaaaaaagcaggaggaaacctcgtcgaattggctgagctagctgaagattctccaatttctgctctctggcatgatgttgtacaccaactctttgggtggcctgggtatttactgtttaacttgaccggacaaaagtatggtggagcaaaaggtctgcgaatttcgcatttctactttggcaaggattccgttttctacaaggagaacgaattgggtttgataatactatcagacgttggcgttgccatcatgatagctattctcttcgtattgggacaaatcttcggcagctggaacgtatgtatcctctggggtgttccttggctctgggtgaacaattggattgttgcgatcactttccttcaacacacagatgcgagtatgccccactacagcaataagacgtggaactttgctcgtggtgccacggcaacaatagatcgagatcttggctttattgatactcacctctttcacgacattattggtactcatgtctgccatcatcttgtctcaactatcccattttatcacgcgggtgaagcttccgttcatatacgccgtgttatgggacagcactataagtctgacaccaagactcctttctggactgcgttttggcgaaatcaaagaacatgtaaatttgtggaagaaagcaaaggctgcgaaggtagtggcgtttacatgtttcgcaatcttcacagttcacccagtcataatgggtcaacacaacagacagaccagcagctagataaagctgaaagcaaggacgagacgaaatccactctagcctcatcaataaatcgggacgcaagaagacgactatcacagtcagctcagctccgagctaaccttcccttattggctgaatga

SEQ ID NO: 39 - DNA, 1401 bp, Golovinomyces orontii
  source 1..1401: mol_type = genomic DNA
atggctatatctaataccagtactgtcaaatccggcacgaagacagtacgagaaaccaaaaagtttgaagtcaaacgtcctcacatctctgatgaacccataactcgacgcaactggtacaagcacatctcctggcttaacgtcactctcattgtcgcccttccgatttatggattaatcgcagcatgttggacaccacttctctggaaaactgccgtctggtcagtgtcatactatttcatgacaggattgggcattacagccggttaccatcggctttgggcccattctgcctactctgctactctacctcttaagctatttctcgcagctgtcggcggtggtgccgttcagggctctattcgatggtggtcaagagatcatcgtgctcatcacagatataccgataccgataaagatccatactctgtccgaaaaggacttttgtactctcacttaggatggatgattttgaaacaaaatcccaaacgcatcggtcgatctgacatctctgacctaaacgacgacccagtcgttatctggcagcaccgtcactatatcaagactgtgatatttatgggaatgatatttccttgtctcgttacaggtctaggatggggtgattggatgggtggatttatatatgcaggaatcctacgtattttcttcgttcagcaagcaaccttttgcgtgaactcattggcccattggctcggagatcaaccctttgatgaccgcaattccccaagagaccacgctatcactgcgttggtgacactcggtgagggatatcacaactttcatcacgaattcccttcagactaccgaaacgccatcgagtggcatcaatatgatcctacaaaatggtgcatttggatgtggaagcagctcggactcgcatatgatctaaaacaattcaagaacaatgaaattgaaaagggtagattacaacaattccaaaagaagctagaccagaaaagacaatcgcttgattggggtactcctcttgaacaattacctattataagctgggaagagtatcaagaaagtgctataaatggaaagggtttaatcgctgttgcaggtgttattcacgatgtcaccgatttcattaaggatcacccaggtggaaaagctctgatatcttctggcatcggcaaagatgctactgccatattcaatggtggtgtatataatcactcaaacgcagctcataacttgttatcaacgatgagagtaggtgttattcgcggtggttgcgaagtggagatttggaagcgggcgcagcgtgaaaataaagatgtgtcacatgtaagcgatactgcgggtcaaaaaatcatacgtgccgggctccaggtaactcgaatctctgagcctgtcgcctctgcagatgctgcatag

SEQ ID NO: 40 - DNA, 1650 bp, Golovinomyces orontii
  source 1..1650: mol_type = genomic DNA
atgggtgccagatctgatggggacagatacaacagagatgtgcctgatctttccagcgtaaatctcatttcgcgaaagtcgttctcttacgatgaagactccaaatcaccaactactatcgacaatcgtttttcacaattacctttacaggaacgaaataatttcgggcttttagtggtactctatttccttcaaggtataccgataggcttagcaacaggaagtgtaccatttcttctcaaaccacacatgagttattcggcacttggagtatttagtttagcgtcatatccatactcactaaagcttttgtggagtcctattgtcgatgcatgctggtcacccagaattggcagacggaagtcatggatcatgcctattcagcttctgtctggcataggaatgatatggcttgggacgtgcgtcaaagacatgatgaatgaggcaaaagcagataatggggcaggaatatggacgtttactttctggtggttcttcttggttttcatgtgtgctacacaagacatagcagtggacggttgggctctcacccttttgtcacccgctaatatttcctatgcatctacggctcagacagttggtttaactgccggtcagtttatgtcctacactgtttttctagccttcgagtcccccgatttcgccaaccgatggttccgcagcatgccctcgtctgagggtattatgactctatctggttatcttcaattctggggttggatttacatattagtgactatttgcttgggccttttgaagaaagaagaaaagatggagaacgaagatggtatctgggaagtatacaaagttatgtggggggttctcaagctcaaaaatatacagacgattatcatcgttcacctgattgctaaaattggcttccaagctaatgacagtgtcacaaatttaaaactgatagacaaggggttttcacaagaagatatggctttgactgtcttaatagattttccatttgaaattggactcggttattatgctgggaaatggtcatcgactttcacgccaatgcgattgtggtgctggggatttgtcggccgtctaatagcagctgttattgcgcagattaccgtagcactctttccatccaacggggttggaacgggctatctccttatagtaattgcggagcacatatttagtacttttaccagtactgttatgtttgttgctatctctgccttccacgccaagattgcagatccatctattggtggtacttatatgactttgctagccaccgtctctaacttaggtggcacattcccaagattctttgttctgaaacttgttgatcttttcaccaaagcaacgtgctcacctgcaccgtcttctagtcttccctcttttaagctaccggactctctacatggccctgtcgttacagagccattttcttgttctctctctatcgataaagaaaaatgcactcagggtgccggaatttgtaatatcgagagagatggttattatatcattaacatagtatgcgtgcttatcggtgttctaactttttggggcttcatcaagcctgcggtattgcgacttcagggattaccactacgcgcatggagaataacaaagggtagttcagactttacaagcaaataa

SEQ ID NO: 41 - DNA, 894 bp, Golovinomyces orontii
  source 1..894: mol_type = genomic DNA
atgcgtcccctcatattagtgccgttatcgtgttctattgctggaatggtactctccttcctccttattttcgctggaaataagcctggattcatggaaggataccagattgttactttaaatacttcaactctcggtcatgatctttttccaaggataccagagattaattcacccatccctatctcaactccgttcgacgatctttataactctgcatctggcatcacaaatcaggtagatggtattttaaacaacgtaatagatgaactatcgcgctcgttgggcattcaacaatggtacggctggaacctcagaaacttctgtgaaggaatgtacagaccaaatgcaacgtctccttctgccgcctttgacgtaaccgattgttctaaaccaaccgctgtttaccatttcaaaatagctgatatcatcgacaagcagcttcaagttggacctcttcacattggcctagataaacttaaatggcctgattctattcaaaataacttcgatcaattaagcacagcactccatgctgctcttgcattctattcaataagcatcgtagcggctggcatctccatttttattggattagtattattattcggatttgaatcactgctactatcacttgtcaacttggcatgtttgttcttgagttttttctcactttttatcgcttccataataatcactgtcgtcaactctaaagcattgaagactgtaaatgagaatggaaacaagattggactgtatgcatataagggtcacaaatattttgctctaacctggtgttcgatggctgttatgtttcttgccgtactaagttttaccggtgtgatgctaaccggaaagagaagaagaggaaaatctggtacgataaaatcataa

SEQ ID NO: 42 - DNA, 1833 bp, Golovinomyces orontii
  source 1..1833: mol_type = genomic DNA
atgactccgaataccaatagacttgaaaaacctactattgaagggtacaaagaagacatttctaaaggtcggatgttgcgatttgaagactcgctgcctagacttcccgtaccaagcctcgaagaaactgctgcccgatacttaaaatcagtccaccctctcctttccacaagtgaatatgaatctacaacaagagcagttcaagacttcttaaagccagatgggattggtcgtaaactacaggcaaggcttgtcgccagacgagagaaccctaagatcaaaaactgggtctatgaatggtggaatgatactgcttatctttcgtatagagatccagttgtgccgtatgtcagctatttctattcccaccgagacgaccgccaacgacgagacccttttaagagagctgctgcaatcagcactgccgtacttgaatttaagaaacaagtagataaaagatctttagaacctgactatatgaagaaattgcctctttccatggaaagctatcagtggatgttcaacgcatgtcgtattcccaagaggcctgcagatgagccaatcaagtactctcaccacgataataagcatatccttgtcattagaaaaaatcaaattttcaaggtcttacacgaggtcgatggtcgtcaattgaatacatctgagttggaacaacagttcaggtgtgtctacgaaaaagcagaaaatgttccatcggtcggtgctcttacttctcagaatcgagatgtttgggctgatgttagactcatgctattaaatgctcacccttctaatgctgaagctttagccacaattgagtcagcatctttcgttgtctgccttgataacacctcccctgtcactctcgaagaaagagctcatcagtattggcatggcaatgcttgtaatcgctggtttgataaacccctccaattcatcattaatgaaaatggaacatccggatttatgggtgagcattcaatgatggacggcacacctacgcatcgcttaaatcattatattaacgaagtaatttcgaataacaagctagatttttcagatccacatattcgttctatcctcccagaacctagtgcagttaagatctacttaaatagtgctatccactctgaaatagagcgtgctcagaaggatttttcaaaaataatcagtcaacatgatctgcgtgtccaggcatatcaggcttatggtaaagcccttattaaaaagtttaagtgttctccagatgctttcgtgcaaatgattatccaacttgcatattttaagatgtacggcaaaaatcggccaacatatgagtctgctgcagtccgtcgcttccaacaaggccgcacagagacatgtcgctctgtatctgatgaatcagtggcgttttgcaaggcaataactagttgttcgatggaatctcaagaagtggtaaagctattctataaagctatccaggcgcacgtggaatatatttcagcggcttcagatggaaagggcgtagatcgtcatcttttcgggttaaaaaagttactggctcccggcgaggatctgcccgaaatctacaaagatccagcatattcatatagctctacttggtatatatccagtagtcagttaagttccgagcattttaatggctatggatggagtcaagtcgtagatggtggatggggaatagcctacatgattaacgagaatagtcttcaattcaatattgtttctaaaggtctaggcagcgaacgaatgagtttctaccttaatgaggctgccggtgatattagagatcttctaattccaactctagaatcaccaagacctaaattgtaa

SEQ ID NO: 43 - DNA, 867 bp, Golovinomyces orontii
  source 1..867: mol_type = genomic DNA
atgagatcagtggtctatcgtccaaatgcatggaaaattagatcatcaatattactatccaagagtttctcctctcaacccttgatttcttatgaatttatccaaacatcaaagccccgtccaggcgttgggcaaattactctaaatagacctaaagcccttaacgctctggtcacccctatgatggtagagattagcagagctcttcaggcgtttgaccaaaactctgaagtttcagctatcgttctcacaggctctcaaaaggcattcgctgctggtgccgatattaaagaaatggaaaatctgaccttctccgaagcttacacgacttcattcattgagttctggtctgcgtttactacatccgtaaaaaagccaattattgctgcagtatccggtcatgcgctaggtggtggatgcgagcttgctctgatgtgcgatatcttgtactgtactgattccgcaaatttcggacaaccggaaataaaacttggtataatacccggtgctggaggaagccaaagactatcgagagcaattggcaagagtcgagcaatggaattgattctcacgggtgagaattttagcggcaaggaggcagcaaactggggtgttgcctcaaagagttttagtacgtgggatgaattaatggcaggcactttaaggactgctgagactattgcaaagcacagtaaagtagctacaatggcagcaaaagaggtagttaataagagtcaggatttagctttacgagatggtgtagaatacgagagaagagttttccacggtttatttggaagtgctgatcaaaagattggaatgagagcctttgcagaaaagaaaaaaccacaatggacacatagctaa

SEQ ID NO: 44 - DNA, 611 bp, Golovinomyces orontii
  source 1..611: mol_type = genomic DNA
acgaagaaattattccactaaacgtcagatgggaagatcctaagactggcgagttcaagaatattattgtaaacaaagatgatggcgttcgtcctggagttactgcgcagtcgctctcaaagattaggcctgctttttcagaaaatggaactattcacgctggtaactcatcgcaagtctctgatggcgcagcagccgtactgttaatgaaacgctcgacagctgagcgcttacgtcaaccaattattggtaaatatgttgcggcttctgttgtgggtttggcacccttacttatgggtatgggtccctgggccgctataccaaaagtctttgagaagactggtctgactaaagatgatgtggatacattcgaaataaatgaggcattcgctagtcaatgcgtctggagtgctactgaactagggctagacttcgagaaattaaatcctcagggcggtgcaatagctttcgggcatccactgggttgtacaggcgcgagacaggttagcacgcttttatatggattgcgacgaagaggtggacgcgttggtgttactagtatgtgtgtagggacaggaatgggcatggcggcagtctgggtggctgagtag

SEQ ID NO: 45 - DNA, 1275 bp, Golovinomyces orontii
  source 1..1275: mol_type = genomic DNA
atggaatcagtgagaatatccctactacaacattcttatagcactaatgagctcagagctagatatatatccacctcaacgtgcagaccgaatgaaattgatatttcttctattcctccgacacctatcactcacctttccgatattgagacagcaatggcagaaacagtctcaaaatttgcctctgatattattagcccaaaagttcgtgagatggatgaagccgagtccatgagtcctgagattgtggaacaactctttgaaaaagggctgatgggcattgaaataccagaaaaatttggaggtgcaggaatgaatttcacagcggctatcgtgggtattgaagaattggcacgtgtagatccaagtgtgagtgttctggtagatgtacacaacactctcgtcaacacagcattcctcaagtatgcaagcccatttttgaaaaatcattggctaccaaagcttgcaacgaatactgttgggagcttctgcttaagtgaacccatatcaggctcagacgcatttgcactggctacaaaagccgagaaaactactaatggatacaaaataataggtaacaagatgtggatcaccaatgcgatagaggcagaagtatttattgtgtttgcaaacctagaccatagcaaaggatacaagggaatcacggcattcattgtggaaaaaaacatgaacggtttctctattgcgaaaaaagaaaaaaagttaggcattaaagctagtagtacatgtgtgctgaattttgatgacgttgaaatcccaagagaaaatctgctgggagaagaaggtgagggctataagtatgcaatgggcatcctaaacgagggtcgaattggaatcgccgctcagatgacgggacttgcattaggtgcatttgaaaatgccgtcaaatatgtgtggaatgaacgcaaacaatttggacaatatgtgggagactttcaaggtatgcaacatcagatcgcacagtcgtatacagagattactgccgcacgttcacttgtctacaatgcagctagaaagaaagaaattggggaatctttcacacaggatgccgctatggcaaagttgtattcagctcaggttgcgcagagagtgagtggattggcgatagaatggatgggtggaatgggatttgtaagagaggggatcgctgagaaaatgtggagagatagtaaaattggcgctatttatgaggggacgagcaatatccagctgcagacaattgctaagctcctcagaatgcagtataaatcctag

SEQ ID NO: 46 - DNA, 1089 bp, Golovinomyces orontii
  source 1..1089: mol_type = genomic DNA
atgatcatggcggaattactcaggcaacccattgatatcgcttcacttgaagcatacatttccaagaatgttaaagagattcaaacaccgttgtcattgaagcagtttggatttggccaatcgaatcctacctatcaaataactgctagcaacaaatctagatatgttttgcggaaaaaaccacccgggatactggtctccatgacagctcaccaagttgagagagaatataggattatacgtgcactgcagaagactaacgtacctgttccaaaagtgtattgtctatgtgaggatgatagcgtaattggtactcctttctatatcatggaattccttgatggaagaattatagaggatccgagtatgccgggtttatcgtcagctgagagaaaagaattgtggtttgatgcgatacatacactggcaaagcttcacgcggttaatccagctgatgttgatctgctatcatttggaaaaccgtctgacttttacgatcgtcaaattaaaaccctcaataaagtttctaaagctcaagcgatcgtcaaagatattgaaacgcaaataccggtgggccaaattccgcacattcatgagatgcttcagtatttcagcgataaaaaaacccagccgcatgatcgggcaagtctaattcatggtgattacaagattgataatctagtatttcatgaaaaagagcctagagtcattgggataattgactgggagatgtcaacaataggtcatccacattctgatctcattaatctcatcttaccattccatcttgaaactaaaccccaagtcatgcttgtcaaatcgcctactcctgaatcaacaaaggagctcgcacaactatacgctcaatttgccggctgggacccgtgtccagatatattgtggggtgccgcttttgggctattccgaaaatcagtaattctacagggaattgcggcgagatatgctgtaagacaggcaagtagcgctagggctaaggacatggcacaagctagacatcatgctgcgaaacttgcctgggaacaagtgcttagaaatctcaaaaacaaggagaatttcactaagctctag

SEQ ID NO: 47 - DNA, 1650 bp, Golovinomyces orontii
  source 1..1650: mol_type = genomic DNA
atggacatacagcggctatctgttgctgatgttgccacgcataacaaaccagatgatatctatgttattgtagatgaaaatgtctatgatctcaccgagttccaagatgaacatccaggagggaagaagatactctcacgtgtagcaggaaaagatgctagcagacaattctggaaataccacaatgagggtgtcctcaaaaagtataaaaaaaaacttttagttggtgttttagacacgaaagttgacaaaaataatgaggcatacaaagaaattcctgaaccagacaatcagagtaataccacagaacttttacagttgagagaagaaacagaaacgacagagccagatggaatattagagccttttggagatatgatcccattcgcagaccctagttggtatcaaggattttattctccacattacaatgtttctcacgtcgctttgcgtaaagaggttcgagaatggattaccaaaaaggtagagccttttgtgagtgagtgggaggaagaccgaaaagttcccgaagaaatttataaagaaatgggaactcgcggatatctggcaggactaatgggctctccatattgctccgagtatacaaatacacgagttgcgtctgtgtcgtccaattgggacgtttttcatggattaatactcacggacgagataagtcgagcaggctcaggaggatttgtatggaatgtgatagggggcctcggtattggcgctccaccagtaatgaggtccgggagtgagaagctgaagaagcggattttaccagagatattaaatggtaacaagcgtatatgtcttgcagtaacagaaccggacgctgggtctgatgttagcaacatcagatgtgatgcggtacttagtgaagacggtaaacattatgctgtcaatggtgagaagaaatggatcacaaatggaatttggtgcgattacttcacaacggctgtccgcacggggtcaatagaaagcggaatggacggaataagtattctactcattgaacatagttttggtggcgttaatacgcgtcaaatgaattgtcagggcgtatttagcagcgggacaacatatgtaacttttgaagatgtcaaagtccctgtagagaacttgataggcaaagaaaatcggggatttaaagtcttgatggcaaattttaatcacgaacgtattgggatcataatacaatgcttgcgtttctctcgagtctgttacgaagagtctgtaaagtatgctcacaagcgtcgaacctttggcaagcctcttattaagcatcccgtgattcgattaaagctcgcacatatgatacgccagattgaagcttcatatgcttggctcgagtcaatagtcgcacaggccgggaatctaccggaggaggttgcaatccttcgccttggtggcccaatagctagtctcaaggctcagagcacaatcactttcgaattctgtgcacgagaagcgagccagatatttggcggtttaagttactctcgaggaggccaaggaggtaaagtggagcgtctttatcgggacgttcgagcctatgcaattcctggcggaagcgaggagataatgcttgatcttagtataagacagagcttgaaagtttcggagctaacaggcatgaaattataa

SEQ ID NO: 48 - DNA, 1290 bp, Golovinomyces orontii
  source 1..1290: mol_type = genomic DNA
atgtcgatttcaaaattttcgattttctctaagacgcgtctcgtacagttacgacgacacttcagcgtttctgcctctgtctgtaagaaagtccgggaagcctacattttaagtgcatcacgaacgccaactacaaagtttaatggctcatttgccactgtttctgcgacccaacttggtggggctgtcatacagtcagctgtgatgaagtccggtgttcctatttccaagatctcagatgtatacatgggaaatgttcttcaagcctccgtggggcaagcacccgcgaggcaagcaagtatttttggtggcctctctcattcaactgaggccacaacaattaacaaagtatgtgcatcgggattaaagtctgtagtgattgctgcgcacaatatccagcttggtcttgcagaggtacaagtagcgggaggaatggaaaatatgacacgtgcacctttatacttcccaagggcaagtgggctgccagctttcggaaacattataatggaagatggactaatcaaagatggcctttgggatgtttacaaccagcaccatatgggtatttgcgcagaaataactgccaaaaaatttggcataacaagagagatgcaggatacttacgccaaagattcgtatttccgtgcccaaaaggcgtgggaggaaaatgcatttgcagacgaaattgttcatgtcaaagtgaagggtaagaaaggcgataaagtcatcagtgaggatgaaggctttcttgacataaagccagagaagatttcttctctcaagccagctttcctacatgatggaactggtaccgtgactgctgctaactcttccacattaaatgatggagcctcggcccttgtcatttctagcgctggaatcgctaaggaatatggagcctcgtctcgtgtattagcacgtgtctgtagtagtgctgatgctgctgtcgatccaatagactttccaactgctccctcgaaagcggttccaattgctttagaacgtgctggcataaaaaaagacgatgtctctatatgggaattcaatgaagcatttgcagttgtcattaaagcaaacgaagagatcttggggctagaaaatgcacttgttaatcaattaggcggggctatcgctctgggccatgctctcggtagctctggttcgagaatactaactacactattgcatcaactgagaataaatgaatttggagtcgcagccatttgtaacggtgggggtgcagcaaccgtactggttgttcagaggatagatctaggagacgtgaaatga

SEQ ID NO: 49 - DNA, 1380 bp, Golovinomyces orontii
  source 1..1380: mol_type = genomic DNA
atgtctactcgacctgtcaatgttggcataaaggccattgaaatttacttccccaaccagtgcgttgaccaagcagagctagagaaattcgatggagtcagtgagggcaaatatacaatcggcctcggccaaacaaaaatgagtttctgtgatgatcgcgaagacatctactcttttgcactcactgtctgttcaaatcttttgaggaaatacaatattgataccaatacgattggccgcttagaagttgggaccgagactcttctagacaagtccaaatcggtaaaatcagttcttatgcaattattcggcgaaaataccaacattgaaggagtggacactttgaacgcatgttatggtggtacaaatgccgttttcaatgcactaaactggatcgaatcttcagcgtgggatgggcgagatgcaattgtggtagcaggtgacattgccctctatgcgaagggtaatgcgcggccaactggtggcgcgggtgcagttgcgctacttattggacccaatgctccagtagtagtagagcccggtcttcgcggcacttacatgcagcacgcatatgacttttataagcccgatctgacaagcgaatatcctatcgtagatggtcatttctcagtaagatgttataccgaagctctcgacgcttgttacaaggcgtataacaagagagagatcgtcttaaagcacatgtccaacggaagtacgaacggtacgactagtgccgttggatacacatctccgctagatcgctttgactttatggcctttcatgctccgacttgtaaacttgtcgccaagtcatacgctcgcatgctttacaatgactttcttgctaacccaagtgcagagatctttgaacaagttcccgccgatcttaaagatatggaatacgtaacttctttaactgataagttagtcgagaagacatttatggggctgacaaagaagcgcttcaacgatcgtgttttacccagtatagaagctcccactatgtgcggaaatatgtataccgcaagcgtttacagtggcttgatcagtctcttgagtaatgttgacagtgccaccctacaagaaaagcgtataggcatctttagttacggaagcggtcttgcatctagtctcttctcttgcaagattgtcggttccactgagactatgcaaaagactttaaacttaaaagaaaggttggctgcgcgacagacaacgccaccgatagtttacgatgagatgtgcgagatgcgcaaaaaggctcatctccaaaaagattacacccctctgggtaatgtggaaacgattataaaaggcgtctactatcttagtagtgttgatgagatgtttcgtcgtaaatatgaaatcaaagcgtaa

SEQ ID NO: 50 - DNA, 939 bp, Golovinomyces orontii
  source 1..939: mol_type = genomic DNA
atggctcaatccccggacagtaaggtagagaaagtctttacgacaaatcaccttggaattggcaggctccaaggaaagaacgcaattgtgaccggagcagcaggtggtatcggcttggaaacatgcattttattcgccagagaaggtgccaatgttcttttggccgacatttcagctccagccctagaaaaagcatatgctaagattgctcaacttgtaccttcggctcgcaaggtcgagaaaatgctctgtgatgtttccaaggagggagacgtcaaagctatggttgaccatgttgattcatggggtggtgttgacattatttttaacaatgcgggcataatgcatgctgatgatgctgatgcagttgacacccctgagaagatttgggatctcactcaggctatcaacgtgaaaggtgtctggttcggctgcaaacatgcagtcatctcatttcgaaagcataaaaagtcaaagggctgtgtcatcaatacagcctctgttgttgctttggtgggatctgctactccacaacttgcctacaccgcgagtaaaggagccgttctagctctaacgcgggagcttgcaattgtacatgcacgcgaggggtttagattcaacgctctctgtccagcgccgttgaatactcctttacttcaggattggcttggagatgaccagcctaagcgacttcgtcgggaaattcattttccatgtggccgcttcggcgaagctgttgaacaagctcgtgctgttcttttcttagcttccgatgacgccaatttcattaatgggcaggaatttgttgtcgatggcggaatgactaaagcatatgtgactccagaaggtcccccgaccgaggcgcctataaataactcattactctctgagccaatcgataattttaagaccactaacatatcagacatgggagtttga

SEQ ID NO: 51 - DNA, 1212 bp, Golovinomyces orontii
  source 1..1212: mol_type = genomic DNA
atgggtctgaataaaaaagaggcagcttacgagtgtgtttcggaagaagcacttattcatcttaaatcatataaatattcgagtgtggacaagagcttgatatcaaggtatatccttaagcattattggaatgcgtttgttgaacttttgccactatggcttgcgccgaatatggttacgctcataggattcttattcattttattgaacgtgatattcttagctatcttcataccagacttagtgggaccgggtccctcttgggtctattatagctttgcctttggtctctggatgtactctactatggataatgttgacggaaaacaggctagaagaacaggtacatctagcggacttggagagctcttcgaccacggaatcgattctttaaattgtactctggcttcactttgcgaaactgctgcgatgggtcttgggacatccaaaataggtgtttttactgccctcgttccttgtctacctatgtttttttccacatgggagacatatcatacccatacactatatctcggtatatttaatggcccaacagaaggactaattttagcttgtacactgatggttctctctggatactatggccccgcgatctggacagaacgcttcgtcgatctgatcggctacgagatatacttgggaaattataagttattcggtacatcgtgttttcgagatatctgggttcctatcatacttgtttcactgttcgtcgctcatctaccattttgtgtaatcaacgtcatcaaagctcgtcgtagagacaaacttccgatacttccaattttcctcgaatggacacctatgatagtttttacactagccataggcgcctggctctattctccttattcaaccctaatgtccgagaaccatctggttctcttctgtcttactatgtccttcgtctttggccgtttgacaacaaaaattattcttgcccatctaacgcgccaaccattcccttattggactgttatgctctcaccattagttggtggcgctgttctcggaaaccttccccgtatcgggcttccggctgcttcggctaccatcgaactgtgtatctgttcctttcttggaattaactgccttaccattccttacgataaatccaaggtcgatcaaaataattttacttctgtgaaaatatctaggaacaacaatgcaaacgacaagcgaatagattaa

SEQ ID NO: 52 - DNA, 4623 bp, Golovinomyces orontii
  source 1..4623: mol_type = genomic DNA
atggccataccaagtaaaataatggcaccaaatgaagtttatctgcttcctctaaatgatgacggaagtcctggcgtccctggtggctacatctacctcaccccgaagggtaataatccaatcattgtacgctttacgatagaaggaacttcctctatttgcagaaatggcagtctgtgggtgaacattccaaagaaaggggaggagtttcgaagacacattttccaggaatacaaacttaaagcagactttaatcttaccattgagatctcaattcctgtatatgaatccggcgcatttaatttctacataacatacacccctttgccagagctttccgagacattatgccaggcgctcgaacaggaaaaaacggagatgtactacataaatgtcgcaccccggctcgaggtagatggtgatataattccaattgacgcgctttgcatattctctctcatatctaaatttatggggaaatacccaacagactgggaaaaacatttgagtggaataagtgaaagaggctataacatgatccacttcacaccattgcagtatcgaggtgcctcaaactctccatacagtatttatgatcagctagcttgggaccctattctattccccaacggtgaaacagatgtcaatgatcttttatacaacatgcaaactaaatatgggctattaagcttgactgatgtggtctggaaccatacagcagctaatagcgcgtggatccaggaacatccagagtctggctacaatgtaactaccgccccatggctacgaccagctttagaactagacacaaagctactggaattcagcagcagtttggaagctattaatctccctactattttgaattctacaaatgatctaacagcaataatggccgccttaaaagaaaatgtttttgtagagctgaagttctgggaattctacatcattgataccaagcgtgatgcagatgcggctgtagatcattggattaatctaatgcttccggagttcacttttcaaggagacggtttaaatggctttgaaagtatcaagtatttcacgacaggtcaacatgtatcatttctgactgctggtgctttgatgaataaggaaactctttcggaacgttacaataggcgtattgaccctaagatagccgcaacacttctcaatgctgtttttggtcgatttgataatgagaacaatctatcagaaaatcgagaaaaagctttaagtttcatgttgaatatcttaaatgaattgaatctcttattgtacaaagagtatgatgaagatgtctctaagattcttgagcaactctacaaccgaatcaagtatactagactcgattatcatggtcccaagctgggtgtaatcgataagaagaatcctctcatcgagacatatttcacgagattgcccagaaacgagttaacagcgagacacaaggaagaggatttagctcttgtcaacaatggttgggtatgggcagctaacgcactaattgataatgccgggcctgaatctcgcgcataccttcgtcgtgaggtgattgtctggggtgattgcgttaagctccgatatggaaataagcccaatgacagcccctatctgtgggagcatatggcaaagtatacccgtgagatggctaggtttttttctggcttccgaattgataattgtcactcgactccaatacatgttgcagaatacttattggatgaagccagaaaagtaagacccaacctttttgttatcgccgagctttttaccggctccgaagagatggactatgtttttgttaagcgcctcggaatcagttctttaatccgggaggctatgcaagcatggggaactggcgagttaagtcgtcttgtacatcggcacggtgggagacctattggcagctttgagctaattgagaattttgacgaatcaaagacaaaaaatattgcagatggagctaattttgacgattcaccgcatgaaattgttcgcaggatccgccaaactccagtaaacgctttgttcatggattgtactcatgataacgagatgccggctcaaaaacgtgatgcacgagatacattaccaaatgctgcattggtctcgatgtgttcctgtgcaactggtagtgtgatgggatatgatgagatctatcctaggctagttgacctagtaagtgagactagattgtattcatctccttcagtcagaaatccaaagagcagtgctggcgtatgtggtattggtgagacaaaaaagctgttgaatcaaatacatactcttatgggaaaggatggttacaatgagacccatatacatcacgaagatcagtatattacagttcatcgggtgcatcctgaatcaagaaagggttactttttaatcgctcataccgcttttcctggatatggtaacgggaatggtgggtttaaccctgttcatcttactggtactaaggctcgtcacttggtaagttgcatgcttgaagttgactcaagcgaggaggcattaaaggagacaattggagacaaaaaattcttgaggggcctgccaagcaaagttattaacctcactggtgttaaaatggaagtaaaacccgacgaaactattattactgttcttgacagatttcctcctggaagtattgccctttttgaaacttggattcccgaggcagaacatgctaccggtcttgataattatatctccagtggtgcagaagccgctttttcagatgtgaatttggtcgatctcaactttattctatatcgatgtgaggctgaagagctagatctaagtgatggtaaagatggtgtatatgacattccaggttacggtaaacttgtgtatgcagggcttcaaggatggtggagtcctctaaaaaaaattgttttcgagaatgacttagctcatcccttatgtcatcatcttcgcagcggccagtgggctctcgattacatttttaatcgtctggaaaagatgtcaaaaactacaatttatgagcggctttcaaaacctgctcaatggtttcgtgaacgattcgatgcaatacgtaagcttccgagcttcttattacccagatacttcggcttggttttacgcacagcttattttgcagcctggaatcgcagtctcaaactaatgaacgaaagtgttcaaaatggtcagttattcctacaggagctttcaatggttagtattcaacagacaggactagtaaaatcagggtctctatatcccaaaaatcttgttccttctcttgcggcgggtctaccacatttcgctgttgattgggctcgctgctgggctactggtctgtatcttggaactggtcgctacgccgaatgcaaagagcatatcctcgcttttgcaagtgtaatgaagcatggtatggtgccaaatctactgtcaaggggtgaaaatcctcgttacaatgcacgtgatgccatatggtttttactccaatgtattcaagattacgttaatactgtcccaaatggtcttgatattctgcaagaatctgtctctcgtcgattcttgccttatgatgatactttctttgatgttgatgatccacgcgcttattcttgttcatctaccatagaggaaattattcaagaagcactccaacgtcacgcttcagcaattaattttcgtgaagccaatgcaggcccagaattggatggtcaaatgcgctccaatggctttaatcaaaatatatatgttgactgggaaaatggatttatatttggcggaaatcaagataattgtggcacatggatggacaaaatgggcgaatcagtaaaagcaggctcaaaaggagttcctgcaaccccccgtgatggcgcagccatagaaatcaccggacttctcttttctaccataacatggctctcaaacctatatcaacaaggcaaatatcaatattcaggtgtatctacaaatctgtcttcatctaatttcatacagtacaaagattgggctgatcttatgaaggcaaattttcaaaaatgttattatataccggttgactcatctgaagatttaaattatgatatcaaccccaaactaatcaatagaagaggtatttataaggacctctatagaagtggaaaagagtatgaagactatcaactccgcccaaactttcctattgccatgactccaacaaaggcttttcatgctctactaatcgcagataaggtacttcgtggtccagtaggtatggctacgcttgatccaagtgatcttaattatcgtccttactacagaaattcagaagactcggatgatttttcgaccagcaaaggcagaaattatcatcaaggtcccgagtgggtctggcctctcggtttctttttaagagccttattaaaatttgatcttttaaggataaaaaagaacggagagagtaaagaaggtataacggaggtattccaacaagttacgaagagacttgtagactgcaaagcagctatcaaaaattctccttgggctggtttgacggaattaacccaaaaaggtggtgaatactgcggtgattcaagtccgacacaagcctggagtgctggttgcctcatagatctttatcgagatgcttacgccatgatgtag

SEQ ID NO: 53 - DNA, 2664 bp, Golovinomyces orontii
  source 1..2664: mol_type = genomic DNA
atggccagcgtagatgttgagattcctcacaggcaacgtcgtccttcaactactgcccccgttattgacttgaagggaccaatcggccccgggtattcccggccgaagcatagacgaactttcactgggtttggagcgggtgacatcaagaacgtcgaagcttccattcctgaaggccaacgcgctgtctggcggaaatatgcagcaactagcttttccaccgaagtagaattcgagaaagaagtcgttcgacatgttgaaactacactggcaagaagtatctacaattgtgacgaagcagctgcttatgcagctacgagtttagccttcagagatcgattaatcaccgattggaaccggacacaacaacgtcaaacctttgccgatggaaaacgtgtctattatttaagcttggagtttttgatgggaagagcgctcgataatgccatgcttaatgttggtctcaaagacgttgctaaaaagggtctcgatgatctaggcttccggatcgaagatatcattgagcaagaacatgatgcggcactgggtaatggtggtcttggacgtcttgcggcttgcttcttagactcacttgcctcgttaaactatccagcatggggctatgggttaagatatctgtacgggatctttaaacaagagatctcagacggttatcaagtcgaagttccggactactggctagactttaatccttgggaattcccaagaccagatattgttgttgatattcaattctatggacaagtacggaaatttcaagatgcacaaggtaaacagcaaagtctctgggagggcggtgaaatagtcaaggcagtagcttatgatgtcccaatccctggttacaatacaaagtctacgaataacttacgactttggtccagcaaggctgccagtggtgaatttgattttcagaagtttaatagtggcaattacgagagtgccgtagccgatcaacaacgtgctgaaactataagtgctgttctctatcccaacgacaaccttgatcgtggaaaggagcttcgattaaaacaacaatacttttgggttgcggcctcactatatgatattgtacgtcgattcaagaagactaaaagaccctggagtcaattctccgaacaaatcgctatacaactcaatgacactcatccaactcttgcaattgttgaacttcaacgaatccttatcgaccaggaaggacttgaatgggatgatgcttggaaaattgtatctaaaacatttggctatactaatcatacagttcttccagaagcactggaaaaatggtctgttccagccttcgagaatcttctcccaagacacctacaaattatatatgatataaatctattctttctgcaatatgtcgagcgcagatttcccaatgatcgagaatttctcagtagggtgtccataatcgaggaatcccaaccgaagttaatccgtatggcctacctagcgattgttggatcacacaaagttaatggtgttgctgaacttcattctgacctcatcaaaacgacgattttcaaggactttgtaaagatatttggtcccgataagtttacaaatgttaccaacggtattacccctagacgatggctacatcaagcaaaccctaaactctctgggttgattgccaggaaattaggtggatacggttttctcaaagatttaagtcttcttaatgatcttgagaactatgttgatgataaggacttcaagagagaatgggctgaaatcaaactcaacaataaagttcgattagcagaatacataaaaaaatcaaaagacattacggttgatccttcagctctttttgacattcaagttaagcggatacacgagtacaaacggcaacagatgaacatatttggtgttatacatcggtatctcacaattaaatctttgactcccgaggaacgcaactctttggtacctcgtgtatctgtctttggaggtaaagccgcacctgggtactggatggcaaagacaataatatatcttatcaacagtgtagcctccgtcattaataacgataaagatattggaaatcttttaaaagttattttcttagaagattacaatgtttccaaagctgagttaataattcctgcaagtgaccttagtgagcatatttcaacggcaggaactgaggcaagtggtacctctaacatgaaatttgtattgaatggaggtcttataatcggaacttgcgacggtgccaatattgaaattactcgtgaaattgggggaaacaacattttcctttttggtaacttggcagaagatgttgaagatctacgtgatgcgcataataagggcaaccacactcttgatccggatctcagcaaagtttttgaggcgattaaaaaaggaacatttggtgatgcaaactcatttagtgccttgatctcggctatcgaggattatggggactactatcttgtctcggatgattttaacagttacaatcaggcacaaaccttagtagatgaggcttttaagaatgaagatgagtggttgactaaaactattactagcgtagctagaatgggtttctttagtagtgatcgttgtatcaacgagtatgctgagaccatctggaatgtagagccgctaaatgttgaatcggaaggaaactaa

SEQ ID NO: 54 - DNA, 1284 bp, Golovinomyces orontii
  source 1..1284: mol_type = genomic DNA
atgggcgcacaggacgttctcacgcgtaagactggagtcatcgtcggagacgatgttcttaagctctttcaatatgcaaaagagcacaagtttgccattccagccattaatgtaacatcctcttctactgtcgtcgcatccctggaggctgctcgtgatgccaaagctcctatcattcttcaaatgtctcagggaggtgcagccttctttgctggtaaaggtgtcgccaatagcaagcaagaagcttccatcgcaggtggtattgctggcgctcattatatccgggctattgctcctgtttatggaatcccagtcattctacataccgatcactgtgccaaaaaacttctcccttggttagatggactactcgacgctgatgaagcgtacttcaaacagcacggcgagccattattctctagtcacatgattgacctatctgaggaatcagtggaatacaacatcgaaactactgctaaatatctcaagcgagctgcacccatgaagcaatggctcgaaatggaaatcggcataactggtggcgaagaagatggcgtcaacaatgaggatgtcgacaataactcgttatatactcaaccagaagacatcctcaatatttacaaaacactttcaccaatctcacaatatttctctatcgctgctggttttggaaatgttcatggtgtatacaagccagggaacgtaaaattacatccagaacttctaggaaaacaccaaaaattcattaaacccatcttcctagttttccacggcggatctggatctacaaaacaagagttccttgacgcaatatcatacggggttgttaaagtaaatcttgacaccgatctgcagtatgcttatctcagtggtgttcgagattacgttctcaagaagaaagattatctcatgaagcaagttgggaaccctgacggagaaagcaagccaaataagcaacacattgatcctcgtgtatgggttcgtgaaggtgaaaaaacaatgtctgtgcgtgttgcggagggtctgaaagactttaattgtgttggccagttgtaaggatatccttgaagccattctttattgcgagagatggcatttgcgtgagggatcatgggagtgttgcgctattaaagttgattttgctcataaaagtggcgtagggggtgacttttgtatcactaaaaagtaaaaaataaagatgaagttttcttgaaccagtcaatcatgagctagcagtttataatatttcagattttgatagtgctctgtagtcctaatataaat

SEQ ID NO: 55 - DNA, 1428 bp, Golovinomyces orontii
  source 1..1428: mol_type = genomic DNA
atggctgatgtgccaagaagttttctggcagaagtcaatcggctggaagagcagttcactgtgtctgccgagaatttaaaagcaatcactgcgcactttgtcaaggagctagagaaaggtttatctgttgagggtggtagcattccaatgaatccaacttggtgcatgtcattccccacgggtgaagagactgggaaattccttgctctcgacatgggtggcacaaatctaagaatatgtgagataacgctgaccgacgaaaagtctgaatttgatattcttcaatcaaagtataaaattccagacgaacttaaaactgggagtgccgaagagctttgggaatacattgccgactgtctgcaacaattcattgagtcaaatcacggaaacacggactcatacttaccattgggcttcacattttcctatcctgcttctcaagactacatagaccatggagttttgcaaagatggaccaaaggtttcgatattgatggcgtagaaggaaaaaacattgttccaatgttcgaggcagctatcgcaaaaaagggtgttccaatcaagttgaccgcactaataaatgacacaactggtacattaattgcatctgcttacactgatacagaggtaaaaataggatgcatttttggaacaggctgtaacgccgcatatatggaagattgcggttctatccccaaactggcacacttaaatctaccacctgatacaccaatggctattaattgtgaatggggcgcttttgacaatgaaagaaagtgccttccatatactccgtatgatatgataattgacaagaattcaccacggccaggacaacaagcatttgaaaaaatgattgccgggctgtatctaggcgaattatttcgcctggtacttgttgacttgcacgataataaggatattcatatattccaaaatcagaatattgaaaaacttcgcaaggcatacacccttgattcttcgtttttgtccatggtagaggaggatccttgggagaacttgtcagaaactcacgagcttttcatgaataagctctccttaaggacgactctccctgaactggagctcattcggcgccttgctgaactaataggaacccgggctgcgcgtctctctgcatgtggtgtcgcagcaatagccattaagaagggctacaaaacttgtcatgtcggtgccgacggatctgtgttcaacaagtaccctcacttcaaaaaacgcggtgcgcaggctctaagagaaatattggactggcctgcaaagaaaaattctaaagaagaggatccaatcgagattctcgctgcagaagatggatctggtgttggagctgcgcttattgcagctttgactatagaacgtgtcaagcatggcaattttgtcgggatcttgcagccagaacacttcgtgtga

SEQ ID NO: 56 - DNA, 2382 bp, Golovinomyces orontii
  source 1..2382: mol_type = genomic DNA
atggcactcgaacaatcctcaatgcctactcctatcaaaaaacgtcgtattgcagtcatgactagtggcggagactcgcctggtatgaatgcagttgtgagagccgttgtccgatatacaattgagagaggatgcgaagcttattgtatttacgagggatatgaaggattggtgaaagggaatgacttgattcgcaaaatggagtggtctgacgttcgaggatggctttcagaaggaggaactctaataggcactgcaagatgtatgagcttttacgaacgttgtggaagacttcttggagcaaaaaatatgattctcaatgggatcgatgctcttattatctgtggtggagatggttctctgactggagctgacaagcttagatttgaatggccaagcttattacaagaattagttgaaacgaaacagttaactcaagcgcaggtcgatccatttcaacatctcaacattgtcggaattgtgggctcaatcgacaacgatatgtcaggcacggacgctacaatcggctgcttctctgctctgcgtagaatatgtgaaatggtagactatatcgaagctacagcatcatcacactcaagagcatttgtcattgaagttatggggagacattgtggatggcttgctttgatggcaggtgtcgcgacaggagcagactttgtctttatacctgaaaagcaaagagcaggtaattggagagaggagatgagtaagatcgtgaagaagcaacgagattatggaaagaggaagactattgtaattgtagcagaaggtgctcaagattatcaaggcctgaagatctcttccgaaatggtgagagatcttttagctgacaaaaatggtcttgctctggatactcgtattacaacccttggacatgtacagagaggcggccaagcttgtgcatttgatcgttaccttgccactgtgcagggtgttgaagctgtgaatgccgtacttgaagctacacctgatactcctactccttttatcgcaatcacggaaaacaaaattacacggaaaccactggttcaggcagttctcgataccatggaagtcgcaaaagcaattaaggctaaagactttgatagagcaatgagcttgcgtgatactgagtttttcgacttgtataattcatatatgacaacaacctcgccgggattaaactctcatatgcagcttcctctccaaaagcatatgagaatagcttttattcacgtcggcgccccagctggtggcatgaatgccgcgaccagagctgctgttgcatattgcttaacgcgtggccatacacctgttgccattcacaatggcttcgctggctttgctcgtcaccacggggacaaaccgtttggtgcagttcgtgactttgaatggctagaggttgatggatgggccagtagaggtggttcggaaattggtaccaatcgagaacttccctcagaatcgggcttagaccatatcgcttcgttatttgaattatacaagtttgacggtctctttattatcggtggatttgaaggatttcatgctctttcacaacttcgcattgcaagagaaaagtacccatcattacgtattcccatgactttactacccgcgactatttctaataacgtccctgggactgaatattctcttggctctgatacctgccttgatgagcttgtccgctattgtgacacggttaagttatctgcatctgcaactcgtcgtcgaatttttgtcattgaaacccaaggcggtcgctctggatatattgctatacttgctggcttggccgtcggtgcttcagctgtgtatataccagaggagggtataactattgatatacttgctgctgatattaagcatctcaagaaagtctttgaacaagacacgggtcactctcgctctggaaaactcatccttatcaatgaaaaggctagtccagtttataatgccaaactaattgcagatataattcgcgatgaagctgctaacagattcgagtcacgcgatagtatccctggccacgtacaacagggtggagtgccatctccaatggaccgtactcgtgccgttcgtcttgctatcaaatgtattgaacaccttgagaaatatgaaggacagtctggtcaagatatcttgaatgatcctcttagcagttcagtcataggaatcaaaggtgccagtattgtctttagctcgatgaaagatgtagaagaaaacgagactgattggcctagccgaagacccctcaacgaattttggttaaagtatcgggaaattgttgatatgatggctggacggccaaagctccccaagcaggagactccactcaagggtctcaaggccaaggacaccaaaaggggcttagtatag

SEQ ID NO: 57 - DNA, 1581 bp, Golovinomyces orontii
  source 1..1581: mol_type = genomic DNA
atgctttcagctatggatcatttaggtagctctactcgtattgagtggctgtccaatctcaatacagaatttacgagctcaaagaattatcgtcgtacctcaatcatttgtaccatcggtcctaaaacaaacaacgttgaagccttgaataaactcaggaaagctggtctcaatgttgtacgaatgaatttttcacatggttctcatgagtaccatcagacagttatcgataatactcgagaggctgtgagagtccaaagtggacgtccggtcgctattgcgcttgatactaaaggtccagaaataagaactggtaacactgtaaacgatgaagatattccaatcgctgctggcacagaaatgaacttcaccacagacgaaaagtatgctacctgttgtgacgataagaacatgttcgtagattacaagaatataacaaaagtaatcgaaccaggacgtattatctatgtcgatgatggtgttcttgcttttgatgtcattcaagtcattgatgagaagactatccgtgtcagatgccgaaacaatggaaaaatatcatcaaaaaagggagtaaatctgcctaatacagatgttgaccttccagccttgtcagagaaagatcaggccgatcttcgttttggtgtcaagaataaagtcgacatggttttcgcttcatttatacgtagaggtgaagacatcagacatatccgcagagtcctcggtgatgatgggaaggacatccaaattattgccaagatcgaaaacaggcagggtcttaacaactttgctgaaatattagaagagactgacggtgttatggttgcacgtggagacttgggcattgagatccctgctgcagaagttttcgctgcccaaaaaaagatgattgccatgtgcaatattgttggcaaacctgtcatttgtgcgactcaaatgctcgagtccatgatacaaaaccctcgcccgactagagcagaaatcagtgatgtcggtaatgcagtcagtgatggtgctgactgcgtcatgctgtcaggtgagacagcaaaaggaaattatcctacagaggctgtgaccgagatgcatgagacttgtttaaaagccgaaaattccatcgcttacgtttcacattttgaagagctttgtagtttagctcgccgtcctgtcagtattacagagtcatgtgccatggccgccgttcgggcgtcattagatatgaacgcgggtggtataattgtcctctctacaagtggtcatagtgctcgacttctgtcaaagtaccgcccagtctgtccgattttaatggttacacgaaactcgtctgcatcccggtacgcacatctgtatcgtggagtttatcctttccttttccccgaagagaagccagacttttctgaagttaactggcaagaagacgttgatcgtagaatcagatggggtatttctgaggctatgaaactcaaggtcttaaactggggcgaaaccgtagtggtggttcaaggatggaaagggggtatgggtaacactaatacgcttcgtgttataaaagcagaggaaaatctcggtctgggaaatcttgattaa

SEQ ID NO: 58 - DNA, 2695 bp, Golovinomyces orontii
  source 1..2695: mol_type = genomic DNA
tccaagtacttgaagattttcattctgaactcaagtttcttttgtacataactgagacttggtctttgttctattatgctcatccccaagaatggctcagccttctactccagggatcggccctcacgcaaccaattacgggctctatcctaacaccagccattcgggtgtatcggtattaactccaggctcaacaacgtcatcgaacaacacttttttgatgccaacttcttctctgaaagggcgtttaggtacggatggatatcggccgaagataactcgaactcttggacataggccggcttgcttggtaaatgcctctgtgacatactgtggcaataatcagatctatgcttttggtggctttgatcagtatacagacgaagtttataatcatgtcttaagattagatatggttagttaccaatggagtttagtcgacaattatggagatatccccggtgttcggatgggacacactgcaactttatataaaggcgaaaaacttctgatatttggtggagaaaatgagcatcgtacctatctagctgacttgataatatttgatctaaagacagctcactggacacagccagctgtgaatggacctcttcctaaaggacgcgcaagacatgcagccgtacttcatgagaacaagcttttcataatgggaggaataacaggacttaataattatgtcctggaagacatttgctacttagacttagagacttttacctggtctagagcatggaagtttgttggtcgatttgatcattctgcatacatatgggatgataaggtttgggtatttggtggaatgggagaagagatggataaaattggggacatatggtggctagacctgaaaggtaatccggcctttgattctcctcctaatcttggtttcctcgataggaactctcccagtagccgcatatctggatcttcaagatcacaactattcagcttagctccaacaactgccattgggagctctgggtatgctgctaattcaagtagtgcgcaggttaatgtaccctcttttcagctgacaagcacatctcctaccgctcctggaactatatcatcaattcgttttcactcaggttctgatatcccatcacagggaacaggcacacacttccatgtctatacctctgggactttaatagatcttattacccctggctcaaccttaccactacaagaatgttcattatattctttggaccttgatagcttacgatggcaaaagctggccgaaggtagagatacgttcagaagtggatttaggtggcattatagtacaacaaacgatgatgggacaaaggcgtggctgcttggatgtcctatggatccagccggtacggaaattggcgccggaggttttgaggaatatcttagtgatatcatggaagttgatctccgaaagtatggtgttattggaaataatattttagctgaaccaccaagtcaaaaatctcgtctaccattggcagaccgtgttacaggcctgtcatggaaaggtcttggtgcagatcttgctagacttttcgatgtgcacccagatagcggcagcggtactgactttactattactgcattacaagatagtgagtcggatgtagaagaaaatatgattagtagtttaaatcgatcgaatggcaattggctggatcctagtacggtaacatctccacctattcacgttcataaaatcatcttgcaagcccgttggcctcactttgctcgcctttataactcgcagatggccgaattccatactaaacggatgcatattccggagccgtatagagtagtaagagcatttcttcactatctttatactgactgtattctaccagaacatggttctgacctcaccgacgtcgccggtatgctagtgatgtcaaatatctacaacatgccgaatttgcgtctgctctgcgtgaatagactcgctaaagaactagatgttgatcacgcctgcactatatggcactctgccggaatcgcaaatgaagagtggcttcggaaacgtgcagctaacttttgtctcctacactggggacgggttgtgcggactcatggtttcttaagattacctcgagcagcattggttgagatgagtcaggagatcgatgtagaaggtcgtgtagttggtggagaagaactagagtttgttggagggcttagtggaagccgttttggctttggcggtggaattataagaaaagagtccacaagcagcagtcatacacagaccttgggaagtgatgacgagaatgaagacatggaattatcttagcatctgacattaaattttttcccctttttttcgctgagaatatagcgcctcatttcaaatatcaaggcttgctatggctcttataactgttttagtagaaatgattgtaatgcgggcgcttaaatggcatggcaaggacccgtgatatatgataaaatgcactggaattttctattttatttcacctcaaactccaatgttataagttgtagaaataattgctgtgataccctacttcgtgggctatcaaatattatcagaattgatagatacctgacataataatacatgataacctttataactatgaaaaaagcaagctagttctatgaacttgattatatttagctatttaaaaacagatcaaatgtacagataaagatg

SEQ ID NO: 59 - DNA, 684 bp, Golovinomyces orontii
  source 1..684: mol_type = genomic DNA
atgaccgctcttattttgcttcggcagggtaaggaatttttggaaaacttcctcaattggaaaaattttcatcgtattacaggttttggtttcagcagagcattatcacctttatccaagcttaaactaacaaatacatctaaatttcctggcaagtgctataatgataaggaggaaacatgcgcaatcaacatcacatcgttatttgatcttgcatctatttgtgctacaaataataatttattaatttacatatcgaccgactatgtattctcttggaagctcggtgaagcgccatatgaagcagatagcaaacctgagctacctaatttctatggagaaaaaaagctgaagggccatagatattgtgttgtttcaagagttccagtgctctatggatcagcttcaacgctgaaagagagtgcagtgaacactctactcgacacaaaaatacaggctcagatcagttacatccaagtccaattggatgattggtcaattagatacacaacgaataccgagcaccttgcaagagtttgttatgatagatttcccaaatatgaaatctgcataattttcgcagaaattaccaaactgcctctagacaatgttataccaaaatccaccaaggatgactctaacgacggcgtacaaaggccattcgactgtcatttatccacctaa

SEQ ID NO: 60 - DNA, 894 bp, Golovinomyces orontii
  source 1..894: mol_type = genomic DNA
atgccaaaagcaaccttggattttctgttgaaagttagaagaatgattccacctttactttcaaagtttcacaaaggacagatgggacgagttgcggtaatcggaggttgtgaagattacactggtgcaccatacttctcagcgatggccagtgcaaggttgggagttgacttgagtcatgtcatatgcgaacctcaagcagctctagttatcaaaacctactcgccagatctcatagtacatcctttgatgcgccagtctaaccatgctgagccatgtgactctgcatcttctctagctgagagtgtaatcaaactgctaccgcgacttcatgtctgtctgatgctggatacttgcgcgatcgtcattgaggctgcgaaaaaacgaaatatgccattgagtaacccaaacataatccagaactacacagaatgcattctaacacccaacttggttgaatttgatcgtctttgcaggagcttgaatatcgaaacttctaaacttggagagatggaaagatcagtagagcttgcaaggaaacttggaggagtcacagtgatacaaaaaggtgctaaagattatatttccaacggtcagaaagttttggtcgtcgataacgaaggtggtttaaagagaagtggtggacaaggcgatactttgacagggtgtttggctacattcctttgctggagaaaagcgtatttagacagattatgggagcacggagaaaatccagatgactctgaaaccttagcactggctgcattcggtggatcagctgttactcgcgaatgttcgcgattggcatattccaagagaggcagaagtctacaagccaatgatcttgctgaagagattcacactgcatttgtgggtctcttcgagagtaattaa

SEQ ID NO: 61 - DNA, 1794 bp, Golovinomyces orontii
  source 1..1794: mol_type = genomic DNA
atgtcgtttgacttctcggacgaaaagaaaacaagctctatcaaagatcgaaaaataacaaattccatcgctccctcgactcctgagaacgaccataagattgaaagtgacaagcgaaccgctctcgagagctataatgatgaattagatggatgcaccgaggtagagaactctcccgtcagaccagctgcgacctttgcagctcgacaagaatacctcagtcctgagcatctacgtgccactatcaatgctcgcctagctaacccactcgctggcttcactcaacgacagttatcgcaacagggaaggtattccaaaatggaagagttaaccgctgaagagtgcaacgccatcgaacgcgaaataactcataaatggtcttgccctgtacaaggaatggatgaaaccgtgatcaatggctcacacatattttttgcgcgcgaattcggcatcgataacgtgaaaagttccagagatacatggctcttaggcttagtcaacgcggctccatatttatgttgcgcaacagttggatgctggctgacaatcccattcaataactggtggggtcgaaagggaacaatcatttttgcctgcattatttccgcaactgcttgtatctggcaatcttgcacctcttcttgggctacttcaccgatgtacgcagccgaatgctcgcccccctccgtaagaggtgcactggttatgcaatggcaattatggaccgcgtttggtcttatgtgtgggcttgttgcagacctttgtttttactacgtaccggattcatcgcacgtaacaggtctgaactggcgacttatgatggcatccccatgcattcctgcactagtagttatatgttttgggtttctatgcccagaatcccctcgatggtatatgtcgaagggtaaagttgcaaatgcctacgagagcatgattcaacttcgcttcaataaagttcaagccgcaagagatatatttcacatatacaccttacttcaggctgagagaactggagccaaacttggacaaaataagatgaaggaattattcactgtacctcgaaatcgtcgagcattacaggcttcggaaatagtcatgtttatgcaacagttctgtggcattaatattatcggatactactcttctgccatcttcctcaaagctggattttcggaaattagttcccttggggctagtcttggctgggggacagtcaactttctattctcatttcctgccatatacacaattgatacgtacggacgccgaagtcttcttttaacaactctacccctaatgagtctttgtctgttttttacaggtttcagtttttggataaatgggcaggcgcaaatcgcctgtgttgccctaggaacttttcttttcgccttttgctattctcctggcgcgagtgcggtgcctttcacgtatagcgccgaagcttacccttcatatattagatcgcagggtatgtcgcttgcaacttctacaacttggtttttcaatttcattttaactgtcacgtggccatcacttttgaaagatcttcatcaccaaggagcattctctttttacgccatttggaatataatcgggttcttcgccgtgctattctttgttcctgaaacgaaagggaaatcactagaggaattagatgaccttatttgttttattagaaaacatattttaaggagaaagacgaaatcagacgatggattcaagaatgctgagcaagaaacaaagaaaaaagacctagccaaagacatggaaataggtgattcgtctaaaaattag

SEQ ID NO: 62 - DNA, 717 bp, Golovinomyces orontii
  source 1..717: mol_type = genomic DNA
atggccctgcaaatggagggggtgaaggcagttcttctggatatcgagggaacagtgtgtcatctctcttttgtcaaggatttgttgtttccatatgcccttacaaacttagaaaccagacttgaaagcctctggactacacctagctttctgccctatttaaatgcatttcccgtcccagtccgtactaatcccaacgtatttcttgaccatatccggaatctaatggccaccgacactaaagatgcatgtctaaaaaatcttcaaggatatctttggcaagatggttacgagaatggtgctatacgctgttcacttttcgatgacgttgcacccacaatgcgaaaatggcattctgctggcttaccaatactcatttattcgtccggatctgtcgcagctcaaaaactattgtttcaatatactgaagatggcgatttacggccacttttaagtggtttctttgacacgcagaatgccggaccgaaaactgagagcagtagctatatcaatatagtcgcgcaaaatacggtaggggtaacggatcctcgtaattggttgttttttagtgatcgagtgtctgagattgatgctgctaaggttgcaggtatgaaagcgttggtcattcttcgtgagggaaatgtacctcttgttccttccgagcaggcacgttgccagggcgttaaaagccttgctgaagtggaaattctcaattag

SEQ ID NO: 63 - DNA, 3132 bp, Golovinomyces orontii
  source 1..3132: mol_type = genomic DNA
atggctattgatgacgatagattgattaatcaggtcacaataacaccaagccgagaacattttcttgatcaaaattgtttggcatatccagaattcaagggaaagaaacttcttcgatcccctacagtaggatatgttgccccagaattcaagggaaaaagggttcaaagaaaagatgtgagagaacaaatactcaagggaggactcattccagaacctgctgtggacgacgaaatcgcttggttctacgaggaactaggtatcgatgacgtctatttcgaatccgagagcgttgaggcgatttcccgtctcgtcatttcactttatgccgctaaaataactgcctgggctcataaagaaaaaaggcaagatatcagactagatatggaagctaatgaccacgcaatttatattgataccagcgagcctggtgttagcagtatcgatgggtcacgttatgaacagcgattggaatctaaatatcttgatgcctctgcatcttcagacacatgctatcgcgtcgaaacgtttcggtcaactacgagtctgcccggaaaatttgagacaaactctactatgcgttgttactttgtctatcagtgtcgctttgctaatccgaacccatcgcctaaagaatctcgcctcgatattattggtgaacagacgtttctcgcgaaagcgaccttaaacacccgaaaaatttatcaagatgttattgaacttgctgtctctagaacaggaccagtcatagaggtttttgatatagaaaattctaatgagaagcgacttgttctcgcattcccccgccggtcggccctcggaatttttagcgcgctttctgatctttaccattattatggagtaactagttctcgaaaatatgtcgaacagttcagtaatggtttaactattatatctctatacatcgggccatctccgaatcttgcctcgaaaaattttcctcctctcgatgtctcgattcatcagatcaccaaggagatatctctattgtactgtattcctcaaaataaatttcatccactatttgtcagtggtagattaagtcttcaagagacaatttatgcgcattgtctactaatttttgtgcaccacttcttgaaccgtcttggttcggaatatgcctcgttggtatctgtcttagattcgtccaatagtttacatgttgaaatcattagcaaaataaagcgacgtttaagaacagagacctttacagcagactatattttggatattataaatttacatactaatctagttaggccactatatgcttcgtttgttaatactcatctgaatcgaactcttgataagaagagaggctatgatcaactcagcccgtcgccggagcccttgaccgaaagtgaacttaaagacttgatcacgaagagttgtcaaaatgagcatgaggaattagtcatgaatgctttcctgacatttaataactctgttcttaagaccaacttttttacccctaccaaagtcgcactgagtttccgattggatccgtcatttctgccagatattgagtattctcaaccattgtatggaatgtttctcgtaattggatcagagttccgtgggtttcatttaagatttagagatatcgcacgtggaggtatccgaattgtcaagtcgcgaaatcgtgaatcttactcaatcaatgcccgtcggttatttgacgaaaactatggacttgccagtacgcagcagcgcaaaaataaagatattcccgagggtggctccaaaggtgtcattttacttgacgcacttcaccaagataaaagtgctgtcgcgtttgaaaagtatattgatagtattattgacttgcttatcccagcgacatcccctggaattaaagatcctatagtagatctatacggaaaacaagaaattctatttatggggcccgatgagaatacagcagacttagttgactgggcaactgagcatgcgcgaaaacgtggtgctccctggtggaaatcattttttacagggaagagccccaaactaggcggaattcctcatgatgcttacggaatgaccaccctttccgttcgtgaatttgtccagggcatttacagaaaattagatcttgaagagacaaaagtcagaaaaatgcagactggaggtccagacggtgatctcggcagtaatgaaatccttttaggtaatgagaaatatacatccatagtcgatggaagcggagttcttgtcgatcctaatggaatcgatcgcgatgaactcatccttctagcaaaaaaacgacagatgatatctcattttgaccgcagcaaactttcggaggatggatatcgtgttctaatcgatgacactgatgttaaacttccaaatggtgaaatcgtcaataatggtacgactttccgcaataccttccacctccgaatcaacaacatgacagattgctttgttccatgtggtggccggccggaatcagttgatctctcgaatgttggtaaattaatttgtaatggcaaatccacaataccatacattgttgagggtgcaaaccttttcattactcaagatgccaaaatttgtctcgaaaaagcaggttgcatacttttcaaggatgcatcggcaaataagggaggtgtaacatcatcttctttagaggtcttggctagtcttagcttcaacgatcaggaatttgaagagaatatgtgtgtagataatcaagggaatgcccctgaattttacaaagcatacgtgcaggaagtacaagagaaaataaaagaaaatgctaggcttgaatttgaagctatatggagggaaagtacaatgacaaaaacttcaaagagtactgtctcagatagccttagcattgctatcacaaagttagatgaagagctgcagaaaactaaactgtgggatgactatgagctccgccaatcaatcttgaccgatgctctgcccaagttgcttttatcaaagattggcttggatctcataattaaaagggttcctgaaaattatcttcgtgccatattcggaagttacttagccagtcgtttcatctatcagtttggtacttctccttctcagtttgctttctttgatttcatgtcgaaacggattgccaagagtcaataa

SEQ ID NO: 64 - DNA, 1137 bp, Golovinomyces orontii
  source 1..1137: mol_type = genomic DNA
atggaggcatgtgtgatcgacgtggtggctactagggtagacgattgcgaaactccagcgtcgaaagatacctccaacgcttggtgtcatccaggagctgccgctttcgattttcgcagtgatgtctttacttcaccgacttgctcaatgctcgaagcaatcaaaaacacaaccttactcgatgatgtctatcaggctgatcctaccacaaatgatctggaatcacacttggcagcgcgcacatctcatgccgcagcactgtttgtcttgtctggcactatggggaatcaaatagctctacgttctcacttgcaacaaccaccgtatgcaattctttgcgatcatcgaagtcatatttttcaatgggaagcgggcggcgttgcaagtctctgcggtgcacttgtcaaaactgttgtaccagcaaacggtgagtatcttactcgggaagatattgagagtaatgttgtgcttggtgatgatattcatagtacgcctactcgggttatatctcttgaaaatacactgggtggcattgtaataccgctagaggagacgcgacgtataacgaattttgctcgagaaaacaatatcaaggttcaccttgatggtgcacgattgtgggaggcagtcgctgcaggtgcaggttcacttaccgattattgtgctctgtttgatagtgtaagtctatgtttctccaagggactcggagcaccagtcggcagtattttagttggtggagaggcttttatcaaacatgctagatggataagaaagtcgattggtggcggccttcgtcagcctggtctgttaacagcaacagccagggttgctctggatgaaacgtttggaagtggcccttggggtgaaggcggaaagctaaaaggcactcactttgtagcgaaaaggataactgcactctggacgtcgctaggtgggaaactactgaggaggaccgagacaaatatggtttggttagatcttgagggttctaagattagtgtagagacgtttgtgaaaattggagcagagcatggggtagcactcgaaggtccaaggctagtggtgcattatcaaattgaagacgctgcagtagagaagttaaaagcagtttttgaacaggtcctgcttaaaacctag

SEQ ID NO: 65 - DNA, 612 bp, Golovinomyces orontii
  source 1..612: mol_type = genomic DNA
atgctgaggggagaactgtattatgcattcgtgcctaacttaattgcaatgagagaacgatgccagattgcctgcaagaaattcaatagatatgaaggtggatctagaagagagaaagtgagattatggagggatgttattaacgacaaatcaataatgccaataactaatgcacctgagaaagaagacttggttctcttccaagatgatcccataattgatgggtcgatcaatgtggactatggtttcaatcttagattgggcaaaggagtctatataaacttcaattgcacttttctcgacacttgcttcatcagtattggatctagaaccttgattggtccaaattgctctttcttcacagctactcatcctcttgacccattcctgcgaaatggcgtcaaaggtcctgaatttggagctcctataacaattggtgaggattgttggtttggcggtaacgtgactgtttgtccaggtgtcactattggacaaggtgtgtcagttggtgcaggtagcgtagtcacgaaagatgtccccccttttcaccttgtggcaggtaatccggctaagatctttagaaaaatagagacaaatacaaccaatgtctag

SEQ ID NO: 66 - DNA, 879 bp, Golovinomyces orontii
  source 1..879: mol_type = genomic DNA
atgagcgaactcactcaccccactatcaaagatggatggttccgggaaatatctgatatgtggcctggccaagccatgacactgagggtcaaaaacatcctccatcatgaaaaaagtgcttttcaagacgtcctaatctttgaatcaactgattatggcactgttctggtacttgacaatgttattcagtgcaccgaacgagacgaatttgcgtatcaagaaatgattactcatttagctatgaactcacacccaaatcctaagaaagtccttgtcataggaggtggtgatggaggagttttacgcgaagtgatcaagcatgacactgtagaagaggcaatcctatgtgatattgacgaggccgtgattcggctttcgaaaaaataccttcctggtatggcgatcagctatcagcaccccaaggtcaaggttcacgttggagatggattcaagttcctaaatgactataaaaatgagttcgatgttatcatcaccgactcttccgacccagaaggaccagctgaaaacttgtttgaaaagccatattttgagcttctttttggcgccttgaaagaaggcggcgttatttcgacacaaggttctgaaaatcaatggctccatctcccattaatcactaaactcaagaaagattgcagagaagtctttccaaatgtagagtatgcatataccactataccaacatatccttcaggccagattggattcatggtttgctgcaaagacgcagaacgcgacctcaaaacgccactacgatcttttagtgctgaggaagaagaaacattacttcgctattacaatgctgatattcataaagcaagctttatactcccaacatttgctcgcgctgcattgaaatga

SEQ ID NO: 67 - DNA, 1440 bp, Golovinomyces orontii
  source 1..1440: mol_type = genomic DNA
atgagtccatctttaggacttgagacagccactgaaagtacaacaaatgcggagggatcctcagtaaacggctcgtccaatggcgtcaattcccatccaggcttcaccgctgttgagactaagaaaaaccctcatcccaaacgatcaaatccatatcagccagtcggggacttcctgagtaatatttcaaattttaaaataattgaaagtactctgagagagggcgagcaatttgccaatgcattctttgataccgaaaaaaagatagaaatagccaaagcgttagatgacttcggagttgattatatcgaactcacatctcctgcagcatctgaacaatcgagagctgactgtgaggcgatctgcaaactgaacttgaaagcgaagattcttactcatattcgatgccacatggatgatgcgagaatcgccgttgagaccggtgtcgatggtgttgatgtcgttattggtacatcatcgtatctgatggagcattcgcatggcaaagatatgacttacatcaccaatacggctatcgaagttatcaactatgttaaatcacataatattgagatcaggttttccagcgaggattccttccgatcgaatttagtcgatttactatcgatttactcaactgttgataaaattggagttaatcgagttggtatagctgatactgtaggatgtgcttctccgcgccaagtctacgatctgattcgcactctcagaggtgttgtcagttgtgacatagagacccattttcacaatgatactggatgtgccatcgccaatgcttactgtgctcttgaagctggtgcaacgcatatagatacatccgttttgggtataggtgagcgaaatggaattacccctctgggtggcctaatggcacggatgatcgtggcggacagagagtatgtgaccggaaaatacaaattacacaaactcaaagatattgaagagctcgttgcacaagcagtagaggtcaatattccattcaacaattacataaccgggttttgtgccttcacacacaaagcaggcattcatgccaaggccattctcaagaacccttcgacgtatgaaattatcaatcctgctgacttcggaatgacaagatatgttcattttgcatctagattgactggttggaacgcaattaagtccagagcaacgcagttgaatatagatatgactgtcgagcaatgtaaagaatgcacgcaaaagatcaaagcactagcggatatcagacccattgctgtcgacgacgcagattcaatcatacgtgctttccaccgaagtactgtgctcggaaagccaatcgaccttttaccagacatcacagaagaggagagaagaattttagcagaaaataaagaaaacttcacatcagagtaccaagctctagaaaataatgttgagccctctctaatctaa

SEQ ID NO: 68 - DNA, 2247 bp, Golovinomyces orontii
  source 1..2247: mol_type = genomic DNA
atgacctccaaaaatgacgattctgctacatcgcaaccaattcagattccctctcccccagttccatcctcaagtcctatccagtcagactttcctctcccaagacaagcctctacggctcgcttagcctcacctgttccctcaaggaatacttttgggacctcacagataaggaatgcatcacaaatttttcctgggctgcttgcactcggcgacgtaacatctcaactaaatacctcacctcattcatcactacctggcccagggatatctgctcttgcatccactttctctaaaaatgccgggcaagtgcactcaccaattgagaccccatcactccgagctatgtcaccagctcaagctaatgcacaactaataggacttggtacacaaactaattatgggtctttcgagtgtggtcgatcaattcaaggcgctccgggtttgactggtacgagtttatatgaagatccggaaatcgtaaagagacacttagtacagtcctcggaaaatttccaaagtaatagccctaataatgatggccaaaagcagactacttccaccagtgatacatcggtaaagggtgatataagtcaaagtaatgacaatactactcaacctagagaagacgatacattttcgagcttacaactacaaggtggtgatattacacgcccaatatacagatggacagaagaagcagaggcacgagctcagggccttggacgacaaggtagaagtaacagtttccatctgtcccggccacaaccagagaacgagacactagatattggatcgattaaagtaccgggcggatttcgacgcaatttcattcagcgcacagctttaagtccaactttttgcgctgatccagaggggagaaatcgtaattcgaatagaatcttaacaaatagcttcatcgaatttttaacaatatatggtcactttgccggagaagaactggaagaggaagatgaagatgaagttgataaatctggcaggttcttttcgtcacaaagctatgctgatcaggatgatgaggacagctatgaaaatgatgagccgacagaaggccgtgccttgattagttctagtcgaaagcgcaaagaacgtatatcgcaagggagaaacagctcgacaggagcaacgctactccttctaaagtcatttatcggaactggagtcctcttcttaccaaaggcttacctaaatggtggtatgatgttcagtaacattgtattaatagttgtggcagtactgagttattactgctttatgttgcttatcaagacgcgtttgaaggttgagggatcttatggtgacatgggtggtattttgtatgggagctggttccgatccactatacttacttcaatagtagctggccagattggttttgtcgcagcatacattgtctttacttccgaaaatctgcaagcattcattctagcggtttcagggggttcgtattctgttgaaacttcttggcttattctcatgcaatgtgctattttcctccctttttccctacttagagacataagtaaacttggattcacggccctttattacttcgattttgacaccataattcatcaaggtggagttgctgatattatcaacttcaatccgaacgattggactttgttcattggaacagccgtttttacatttgaagggattggtttaattattcccattcaggaatcaatgaaaaacacccaaaaatttccagctgtgctcgccggagtaatggttatcatcactgctatctttctctcagtaggcgcaatctcttacgctgcttttggatccaaaactcaaaccgtcgtcctcctcaatctacctccagatagtaaacttgttaatgctatccaactcctttattcaatcgctatcctcctatcaactccattacaagtctttccggtgattagaattatggaaaatgaaatttttacacgaagtgggcgatacaatctatatatcaagtggcagaaaaatgtttttcgctttctcgttgtcatgatttgtgctgggatttcttggtttggcgctgctaacttggataaattcgtggctatcgttggtagcattgcctgtgttccactgatttatatctaccccccaatgcttcatttgaagagcgtcgcacagagtccctttcacatatttaccgactgtcttttgtgtgttggtggttttattattatggtctacacaacagctcttactctcatgagttag

SEQ ID NO: 69 - DNA, 2091 bp, Golovinomyces orontii
  source 1..2091: mol_type = genomic DNA
atggcttcgagtttacacacagctgactatcaatccataccttctttccagaaaatcatatcgcagaacgaagatccgcccgaagataccgaagtttttaattctcagcaggaatttatccaaaattttactctgcgaggggtccttgttggcttagtagtagggacaatcacttgcttctccaacatgtactttggtctccagagtgggtggatatctcctatgtccatgcctagcgcactcatgggttttgtcttcttcaagagcatctctcgacatctcgacttgcctttcacgccagtcgaaaatgttttgatccagtcagtagctggaggtatgggaacaatgcctctgggctgtgcattcgttggtgtcatgccggcactgaacaaaatgttgacgtctgaggaaaatgggccaattaacttaagcctttggaaactcatattatggtcactcggattgtgtttctttggtgtcatatttgctgtaccgttaaggaaacaagttattatccgagagaagctcaaatttccgtcggggactgcaacagccgtaatgataaaaatgttacacgaaaaaaaaacagtcgcagatattccaacggatcaagatatagtcgcacaacactcacttgaatacgacgagagaaataccacagacaactattcgaataaagaatcaaagggaaaatggaaatctgaaagtagagtattggggattgcctttgcattatctggaacctacactgtcgccacttatttttttccaattttacgagatctgccaatttttggatctacaattgcaagcacatggctctggactttcaatccatcattggcatacgttgggcagggtattatcatgggacccacaactacctcacacatgctcctaggtgctgttgtaggctggggaattctatctccattggcaaagtaccgtttatgggctcctggctctgtcgataattgggaatcgggaagtaaaggctggattgtgtggatttctttggcaatcatgctgactgactctgtgataagtcttggctatattggctcatctacggtagcaaagatttacaaagtcgagctggctaacattcaagaaaagatgaacaaatcacgttggaaaggagtattcggtatcaatatctgtagccctgataccaataaatacactcatgtcccagaaaatgaaaatccttacgattctgagcaatatatccaagtggaatcagagactactgagttagatgctctaccagaaaactgcgttaagaatcgcaccgtgtgtataactggggttatgtctatacttttttgcgttgtatcaatccgtgttgcatttgggtcccttgtcccaatctacgccacgatactagccatccttgttgctcttattcttccattatggacagatctaaatccagtctctggcatctccaaaattgctcaactactttttgctctaatcattccgcgttcgaataaaaatgctgtcatcattaacctcgttgctggcgctatctctgaagcaggcgctcttcaagctggggatctcttacaggacctcaaaactggacacttgttaggtgcagcccctgatgctcaattctggggccagatcatcggaagtgctgttggtgctgtcacaagtgcattgatatacagactctatacaaacatatatcctataccgggagaatttttccaagtaccgactgcacacgtatggatttttaccgctcgactcgtgactggtcacggattaccgccaatggcatggccttggtcgataggcgctataattctctttactggtatcacaattttgagaatcataggtacgggtaaaaaatggcatccttttatacccggtgggattgctgttgcagttgggatatacaatgtcccttctttcaccctcgctcgcgcaattggaggttttctgggctggtattggaagaaatataaatataaaaacgactcaaccgttatcatcctagcaagtggacttattttgggagaaggaattgtcagtatcttaaatttaattctagctagtgttaaggtaccacatttatga

SEQ ID NO: 70 - DNA, 1020 bp, Golovinomyces orontii
  source 1..1020: mol_type = genomic DNA
atgtcaagatcccttcacaatctgagcaccattcagaagctttttccaatcttgggaccatctcaaattacttctaagtttttgctatgttcacgtacattatttaggcagactcgctacagttcccaatttaatttgggctatacccgggccattgaaaggaaacccttaactttaaagtctattgaatctttgtacaaaagagaggagcccatcttggcactcactgcccacgactttcccagtggatatattgctgatgaagctgagattgaaatcgtacttgtgggagacagcctggccatggtagcaatggggttagaagatacaagtgagattctacttgaagagatgctactccattgtcgctctgtttctcgagctgtgaagactgcttttacggtaggggatcttcctatgggatcctatgaagtatccccagaacaggctctaatttctgctattcggatgattaaggaaggtagagtaaaagctattaaattagaaggaggcgcagaaatgggcccaaccataaagaaaatagttactgccggtattccggttctcgggcatatagggttaactccgcaacgacaaaattctttgggcggcttccgagtacaaggaaagacctccaagagtgcactcaagattcttgaggatgcattagccatacaggaagcaggctgttttgctgttgtgattgaggctatacccgcagaggtagctaccataattacaaaggaactttcaatcccaactatcggtattggcgctggtaatggctgttcaggccaagtactagttcaggttgatatgactggaaattttccacccgaccgttcgataccaaaatttgtcaaaaagtattgtgacatttggaatgagagcttgatggggatacgatcatatcgagaagaaactaagtgtaggaagtttcccgcacacgaacacacttactcaatccctaaaaatgaacttgctgagttcgagagaatactagcttctaaagaacactag

SEQ ID NO: 71 - DNA, 1506 bp, Golovinomyces orontii
  source 1..1506: mol_type = genomic DNA
atgatctcacaaactgttctactcagccggacatataatgacgcaattgcacttttaaatactctccagactccacatcaaaagctgaaaacacgtctagaatccaatgaaaattcctacgctgagagtaatgtgaagcttagggcctgtcttatacatctaggatattcgctatcagatctcaatcgtttaaatattgtacatatcacgggcacaaaaggtaaaggctcaatttgtgcatacgtcgattctattttgaataaatattgtctttctaatagttttccattacgggttgggctctacacttccccccatctcgtgtcagttcgagaacgtattaaaattgattctactacgatttcagcagaaaagttcaccaaatatttctttgaggtgtgggatcgccttgaacagccctcgattgggaatggtactcccattcttattgaaaagcccttctattttcgatacctgacgctattgagctatcatatttttctacaggaacaggtcaacactgcgatatacgaagtaggcataggtggtgaatatgactccacgaacattgtagagtgtccgttagccactggtatttcgacaattgggattgaccacacatctgtacttggaaatacactctctagcatcgcgtggaataaagcaggaatattgaaaaagaattgtcccaattactacgttgaccaagaacccgaggccctagccgttatttgtgaacgagcagaggagcggcaagtcaagtcctctcaaaatgtcaaaatactgccccaactagaaaaagtaaaaattcagccaaatgccaaatttcaacagcggaacgcaactcttgcagtttacctatcacatactactctacaaaagcttgatccaaactacagttacacgctctcgacttctgctccgttaccctctttctttgttgatggtttagagcaagttatctggagaggtagatgcgagaaaatagtagaagattctctcacatggtatctagatggagcacacaatagtatcagcatcaaggttgcattaaaatggtatgcaaatgagttaattaaagaacttcatggaattgagcctaaaatcggtcggcgtatcttgatctttaaccaacaggggcggagagattctttttcgttgctggaagatttacatagagaagccgtgactagaaaaatcagttttgatcatgttatcttctgccctacagaacccgaagaatgtggcgataaaaaagattgcatcaacctctccattgagagagaattaattaatggtatggttcagcaaaaaaaattcgctgagatgtggaagtctcttgatcaagagggaggtcaacttcatgtcttgaagtttagaaaatctataaaattcactcgggatctaagcatgaagcctaatgaaaactatcacgtcttcatcacaggcagcgtacatttggtcggtcgagctctagggattttagagggcgtagaatcattatga

SEQ ID NO: 72 - DNA, 1563 bp, Golovinomyces orontii
  source 1..1563: mol_type = genomic DNA
accatctgccccacatctagcgcccgaatcaaaaatctacaggcgcataatcggttgtagaggttttgaacgaattcgcaagccaaccgcttacttcaaaactatggttatttcagagaaacatgttcacatactgggcttaggaaatctgggacgtttcttcgctcacagtcttcaagtggctgactgtaccgcaccaataagtctcctttttcacaggccaggacttttcgaagaatgggaatcggcgtcgcgccaaatctccatcaccacgaaagaatcatcgattagtaaaggtgtcttcggtgcctacacgtcgaaaagttctacatacacaattgaacccatccatgcgagctcaacaacaagcaattcacttctcggacaaagtaacgagaagaaagatgagtatattcataaaactttggaggcgctaagatcagtgaaagatcggctttcagagaaaagtacgattctctttgtacagaacggtctaggtaatgtatcgaaggttaatgaaagtttatttccggatcctgtgactcgaccttcatatcttacggccattgtttctcatggactcttttcaatcggtctaggtgcagtaacttttggtcatcctagttccgaatcttctttaaatcgttcctcagcgttagtagagagaatcttaggttcctccagtttaaatgcgactcatcaatgctatatcaatcctttatcggctctcttttactgcccaaatggacaaattttctggatagggataagtcgagagccgctccttaagctcgtgagacgcctcattcaagaaatacatcaagtcttcttacaactagatacccccgagggtccaatcgacccagaccgattttgcccctcaaacatggagctcatggtttcttgcacagcgcgtaagactaaggataatcttagttccatgttacaagatgtattgaaagaacgagacaccgagatcgattctattactggttggattgtcgccgagggggaaaaaaagggaattgatgttaaattgaacaggaaggttattgaattagagatgaatgcttggaatcaggcactggaaaatctgggaaaaaatggcatcaaaagatcaaagaaacttttatataataagtatgggatgtgtgttcaggcatggtgaaatagatttgtatgttgtttctatcgtacagaatcttcgcgcataaccttagacaagttccagatgcgtgctgagctgattgcaaaataaagcttcttcatcgttgtcagaaaaaagctgtgagctatttttccgaggtcgaatttgtaatttctcgagatgcccaagcaacaatttatttgtttctttaggagtgatagcaaatgttggacgaacataactaagacatgaattaacaatcctctccaccaagtacgtagtaagagctgttgaatttattgatgagcttccctgagaggaaaatgtgtgaagagtaaagagttcttttgtgcctgtgtagcagcagtgtgatattgacccatgggaacataccgttcagagttatatgggctagt

SEQ ID NO: 73 - DNA, 1257 bp, Golovinomyces orontii
  source 1..1257: mol_type = genomic DNA
atgtctaacaaatattccgaaggatatcctggtgctagatactatggaggaaaccaacatatcgacacaatagagcttacttgtcaggctcgtgcgctgaaggcattcagactagattctgacaaatggggtgttaatgtccagtctttaagtggatcgcctgctaatctccaagtctatcaggctatcatgaagcctcatgatagactaatgggcttggatctaccccatggtggccacttgagccatggctaccagacgccatcaaaaaaaatatccgctatatcaacatactttgaaacctttccgtatcaggtggatctcgagactggtattattgattacgaccgactagaagaaaatgcaaccttatacagacctaaaactttggttgttggtacttctgcctactgtcgtctgattgattatgctcgtatgcgcaagattgccgacaaagtcggcgcctacttacttgtcgatatggctcatatttctggacttgttgctgggggtgtcattccaagcccatttgaccatgctgatattgtaaccacaactactcacaaatcgctgcgtgggccccgtggtgccatgatattctttcgtaaaggtattcgctcaaccgatgtaaagagtggtaagtcaatcatgtatgatcttgagggccccataaacttttctgttttccccggtcatcaaggaggtcctcacaaccacactataaccgctctagccgtagcccttaaacaggctactacacctgaattcatatcataccaagaacaaattataaaaaattcaaaagcactagagtttgaatttaagaaactgggctataagctcgtcgctgatgggactgattctcacatggttcttctcgatcttcgtccccagcgactagacggtgctcgggttgaggccatgttagaacaaattaacattgcttgcaacaaaaacgccatacctggggacaagtctgctcttactcccttcggaattagaattggaacccctgcgatgacatctcgaggctttggcgtcaaggattttgaaaaggttgctcgttatatcgaccaggctatcaagctatgcacagatattcaaaactccctacctaaaagtgataacaagctcaaggacttcagaactcatatcgcaagcggcaatatagccaaaataaatgaattgaggagcgaaatttcatcttgggctggaagctttcccttgccggtagagggatggagggaaagctcttaa

SEQ ID NO: 74 - DNA, 585 bp, Golovinomyces orontii
  source 1..585: mol_type = genomic DNA
atgcctggatactcgcccgaatctgtaattgacaaaaaaattaacgatctgtgggcatggtggaagcgagacacggacttaagcttgtatgtgggtctggaacagagtctggcaacaattgcccgtgtaatcagcgataacaacggtgttgatggaatcatgggattctctcaaggtgccgctgcagccgctattgtgacatcgctgttggagccagaacgcatcatggcttttgaaaaacttcaaaaaattgacaccgactcatttccttatcctcaagaatggaaagatctcaagactctgtgtccggatggattaaaatttgctgtagcctactctggcttcttgccctcacatcccgcatacaaagcttttttcgaaccaaaaattcagacacctattatgcactttatcggtagctatgatactgttctagacgaaaaaagatcaaatgctcttgtggatagatgtgcagaaaatacgaggaaactcatctatcatcctggcggccatttcgtaccctgtgataaacaaatgtctaacgttgtgatttctttcattattgaatgcttgactcataagtaa

SEQ ID NO: 75 - DNA, 2493 bp, Golovinomyces orontii
  source 1..2493: mol_type = genomic DNA
atgcctgaaaagcccttactattattcattgatgcttacgatagcttttcgaacaatataatttcacttctcgaaacgacacttgatgtctcagttcgttcggttaagattgatgatcctacactactcggctcaaatgatgctttatataaagagttgagtaattatgccgctgtggtgtgcggtccgggtccgggaaatgtggaaaatctggacgatgtaggcctgatgaggcaaatgtggaaattgcagaatgatgagatgctgccagttcttggaatctgcctcggattccagagtttatgcttcgagtttggtggtgtaataaagagactcaagggaccacaacatggaatcatcaggaacgttacacatattggggaatgtcctagtggtgagaatacaatttttcatggagttgggaaactcaatgccacactttatcaaagtctttgcgtggacataggacatagcgtaatttcaacggggcatagtaacgagaagtggagtgtgactgaccagtgtccgtatctcctacctctagcatgggtagaacacgatctatcggtgccaaatgactctggtatcaaagatgaaaaaatattagtcgcggtccaacacattcaacatcccttttgggctttgcaataccatcctgaatcaatatgtactaatggtgaaagtataaagctcatcgagaactggttcgcacatgtcacgaaatggaatcaggtctatcggcgaggatttcaaagttcaaaagagctgatcagaagtagctttacgattgctaaacccctcttggataatagcatacttcctcctgagtctatatcccattgttctaattattttatgcacaaactcaacgctgatccagccgagattcagtgtttcactcgtaaagttaatctcccgactggaatggctgtgcccgaaatcattgagcgcatgaatgagggaatgcagggggagcatattctgctggagtcttcaaatgcacacagaaactcgccgatgccaggaaaattcactataatcgcacttgatattggaaaatgtaccaggatcgagtatactactgcccagccgtatttcaaattgctaacaccacagtctactgctggaggtgaaatcagcctaaaaaaacagattattgagaaaaagcgtttcggaggagtgtggaattatatagcccgtgaactcgaaagcgtcaaaaattgtgctggaggctatgacgagtctccattctggggtggtttcatgggctatacaacatacgaacttggtttggagagaattaacgttagtacagagtacgaatctgccgcagagaaaaaacccaggcctgatttatactttgtttgggtgaactcttccatcgtcgtagatcacgttaatggccaaattttcatacaaaaactggcacccacatcagatggaattggcgctaatttttggattgaaaatatcatacaaaaattacaagcaactcgggatcctttggaggtttcatcattttgcaagcattcggaaatagacgagaattctatcaaaagtagagttcagtcaattcacctcccagacaattctgaatacgagtcaaaagtactcgcatgtcagtcatttattagtgcggggtcttcctatgagctctgcttaactgatcaaactactgtctgtattgaggggccggatctatcatgggagatctataaaaaacttcgtatctctcaaccagctccttatgcttcgtacttttgtctaggtcctatgaagttcatatcagcatcacctgagcgttttttaaaatgggatgaacatggaaaatgcgaactccggcctatgaagggtactgtcaaaaagtcgacgtccgtcacttctctgactcaggccattgaaattcttcaaaaccccaaggaaaaggcagaaaatttaatgattgttgatttagctcgtcatgatttgtatggaatatgtggctgtggaaatgttactgttccaaatctcatggttgtcgaagagtatgcttcggtgtttcaaatggtgtctgtgatttctggtcagatccgagatctacctgcccataaaaatactaagattcttgaagatagaaaagaagtaaaaacagagacatcttctagagctcatacaggtctcgatgttcttgtagcttccttgcctccgggaagtatgacaggcgcaccgaagaagaggagttgtgaaatcctaaggaaaattgaagataaagaaagagggctctacagtggtgtcgtaggttatttagatgtccgtggtaaaggtgattggagtgtaaatatccgctgcctcttccagtgggatgacgaaatgattataacgagtcggggagataacacgcgagaatatcatatcggcgcaggaggggcaatcacaacgttaagcactgtctcggaagaaacagaagagatgctaacgaaactgaatgtgactttaagtcttttcagtgattga

SEQ ID NO: 76 - DNA, 978 bp, Golovinomyces orontii
  source 1..978: mol_type = genomic DNA
atgtcctcacgatcctatcttgatcttgttaacgaatgcgatgtattacaattttcaagcaacgaaagtatcaacacacatctcccagattactttactctcacctggaatgatacagccataggttgcgtgccgggatttatcattgaagccttcgatagactgcctgtaagtctccgagatagtcttcgactcagtatcaattatcccgagcgcaagctatcactatttcatgatgtttcctttaaaagaagatgtttggtcgccgcagatctctgttattactggaaaagtgaacgcaaatttggcttgctcaaaggctggcgctctgaacttttccccgtctatggacctggaaatgagcttctttggagcatggagcgaagcgctattcctctaataggagttgtgtcatacggaatacatttgacagcgtatatacgcgattcaaattctccatatggtcttaaattttgggttccgcgccgatcaacgaacaagcaaacattcggcggaatgttagataatactgtggccggaggattggcagtcaacgaggatccgctaacttgtctcgttcgagaggcagaggaggaggctggtctccaaaaagacttggtacaaaaatattccaagacttgtggaacagtgacctacatctactacactgattcaagagctggaggagaagttggacttgttcagccggagtgtgaattcatttatgacttagaactacccgagagtgtagttccgacaccgaccgatggtgaggttgaagaattttacctctggagtgtagatgaggttcaagcaagattgagaaggggagaattcaagccaaattctgctcttgttatgcttgatttttttatcagacacaagatattgacaacaaagaatgagccgaattacgaagaaatcaaaagacgtattcatcgtgacttaccattcccagggcctcatttgaaaaagtag

SEQ ID NO: 77 - DNA, 714 bp, Golovinomyces orontii
  source 1..714: mol_type = genomic DNA
atggccccgagtcaaaaaccatccttcaatccggccttgcttatagtggaccttcaagaagatttctgcccccctaatggatctttagctgtagctaatggtcgcgatataattgatattgttaataaattacttgatctacccttcatcctcaagattgcttcaaaagactggcatcctgaaactcatatttcatttgcttccaatcaacgaggaaaacgacctttttctgatatgattactgtggaaaatcctctaagatcagctgaaaaaaaggaaattaaactctggcccaatcactgtgttgctggaacatggggggcccagctggtggcagagttgaatagagataaaatagatttggttattgaaaaaggtactaatgagagcaccgagatgtactcggtattttatgacatttggggaaatgagagcggtcttaccaagattctgaaagaaaaaaatattacggatgtctgtgtagttggcttggctttagattattgtgtaagagagacagccaaacatgcggccatggaaggctttgagactgtcattttgagagaagctacaagatcaatttgtaccgaagaggattggggcccgattgagaaggatttacagaactccggcgccagattcgtagacatcaacgacgaagtgttcagtaggatcatggagcgtgaattgttctcacagagctcaattaattag

SEQ ID NO: 78 - DNA, 1719 bp, Golovinomyces orontii
  source 1..1719: mol_type = genomic DNA
atgaccccaattgctacctccgagatatgctcttcaaaaaacgcaaatgccaatgagacaactttattgaaacaggaaaataatatcagattgttacctgtaactctgatatctggatttcttgggagcgggaagacaactcttctcgagcatatcctgcgctccaatgaacatggtcttcgcatagccgtaattgttaacgatatgtcaagtcttaacattgatgcttctttgattcaacagcatacggtatcagaatctaaagagaagttaattcagttacaaaatggctgtatttgctgcaccctgcggggtgaccttcttgaagagatcgttcgtcttgctcgtaccgacactgtgcaatatgttgtaattgagagtaccggtatcagtgagccgatgcaggtcgctgaaacatttacgacggagttttccaaaatgatgattgaacaagatgctgttaatgaagtcggagaagaaatgattagaaatgacttgggtggtcttcacaaactcgcaaaattagatacaaccgtatcagtagtagactcattcaatcttttccaaaactttaacacagcagagtttttatcggatcgttacgggaaagatcaaatcattcctgaagacgagcgtaccattacggatcttatggttgatcaacttgaattcgcagatgttatcgtggtaaacaagttggatgctatcgatgaaaccactaaaagaagagttctaggcttagtaaagaagttaaatccgactgcaaaggttcttgaagcaagttatagccgcatagacgtgaaagaaataattaacactgggcgattttcttttctaaaagcagcttcaggatcgggctggttgcagagcttgcacgaattgtcaatgagagaaattgacggtaagatgaagatggctcctaagcctgaaactgaagagtatggtatatcaagctttatatacagtgcgagaaacccgtttcaccccaagagactctttaatcttattcacgataagtttatcgtcattcaaaataatggagatgatgatgatgatgatgatgatgatgatgatgatgatggtgatgatgatgatgatgatgatgatgatgagaaaatgggggatgatctattaggtaaggatttttcaaaagaaatcgatccacagataatcctggccaataaaagaaatcatccagcactcgctagtctgcttcggtcaaagggattttattggcttgcaactcggccatatcaaattggtgaatggagtcaagcaggaggtatgttaactcttggaggtggaggtccttggttttgtactgtcgaaagagaccaatggcctgaagatccagaaattgtgaaaagcatcgaagcagatttccagggtctttggggcgatcgcaggcaagaaattgttttcatcggagagaaaattaacgagaaagccgtgattgaaatactcgatgaatgcctactaaccgatggagagatgaaaaaatgggtagccatcatgaagaagagaaaacaaactcctgagcagatatgtgaagcattaaatcaagcattcgaagatggcttcgaagactggggcgatatggccattgacgatgaaggacatgatcacgagggacatagtcacgcaggccgaagagtgcccgctaatgaaatcttaaaaaaaagaatgaagcaacactgttactattatctctttcactaa

SEQ ID NO: 79 - DNA, 942 bp, Golovinomyces orontii
  source 1..942: mol_type = genomic DNA
atgtcagcatctagcctttctcagtctacagctgagaaaagacacgaagaatatcagtatttagatctgatctccgaaatagtagagacaggggagcatcgaccagatcgaactggaactggaaccttttctttgttcgcgccaaaacctttaaaattccagctttctgaatctggaaagccgattctgcccctaattacaaccaggcgcatcttcttacgtgctgtaatcaccgaacttctctggttcatatccggctcgacctcctccattcctctggtagaagcaggaataaagatttgggatggaaatggaacccgtgaatatcttgattcggttggtttatctcatcgtgatgttggagatcttggtccaatatatggattccaatggcgtcattttggtgccgactacgttgatgctaacactgactatactgggaaaggggttgatcaactcgctgaagttgttgcaaaactcaagacaaatccatatgaccgccgcattattcttacagcctggaacccgcgggatctaaagtcaatggctttaccgccttgtcatcttcttgcacaattttacgtctcattcccacaaggtagtaaatctgttgggactcttcactgtcttttatatcagcgtagctgcgacatgggccttggagtaccatttaatattgcaagctatgccttactcactcatatgttggctcatacatgcgaactactgcctgggactttgacgcacaccatgggtgatgcacatgtctatgccgatcatgttgaggctttaaaaacacaactgacacgtgagccgcgtccattccctgaaattgagattaggaaagaaaaaggaggaagtatagacggctggcttgtcgatgattttctcatcaaaggctacgaaccgcacaagtctatctcgatgaagatgtcggtgtaa

SEQ ID NO: 80 - DNA, 660 bp, Golovinomyces orontii
  source 1..660: mol_type = genomic DNA
atgtctaaacaaagtctcccagactcgtcaatatctcacaagtgctcaccctctcactcagacgatgcctcgagaaggaactccctcacctccgccgccagtgcctccgaactcgcctgtataaaggtatccttacgagctgcccttcgacaatttccagactttcctactcctggtataaattttgttgatatcatgcccctcttttctgaccctaaacttcacacatctctcatacgagcactggaacttcaagtgcagacattttatgacggcaaatgtcctgatgttattgtaggcctcgacgcgcgaggctttctctttggtcctagtctggctctacgacttggtgcaggattcgcccctgtgagaaagcgaaataaactaccgggcccgacattcgaagcttcatatgagaaagaatacggagcagatcatttccagattcagaaagatgctgtaaagaaaggtcagtcggtgctcattgttgatgatataattgcgactggaggctctgcacaggcagccggaaaattagtcgaggaagcaggaggaattattattggatatctttttattcttgacatcgagtttctcaagggttgcgacaaactcaacgcaccgacatcaattcttctctccgaatcgctctttacataa

SEQ ID NO: 81 - DNA, 738 bp, Golovinomyces orontii
  source 1..738: mol_type = genomic DNA
atggcttctggatccgatcaaaaatctacaaaacagagcgttggcccggattacaggcatcctcagcaaaagcctacggcaactgtttctacttcggtcccttttgaaaatgttcatatcctaccacaaacgccgcaactaatagctctccttactatgattcgcgatgaaaaaactgcccgagcagatttcattttttacagcaaccgcatcatccggttacttgtggaagaaggactaaatcaccttcctgtggtagagcataatgtcataaccccagtaggccaaacttacgctggcgttaaatttcgtggcaagatctgcggcgttagcattatgcgggcaggcgaggccatggaacaaggactacgggattgttgccgtagtgttcgtataggcaagatcctaattcagcgagacgatgaaaccactaagccgaagctattctatgacaagttgcccatggatattgccagccgttgggttctattgctagatcctatgtttgcaactggtggttcagcaacaatggcagttgagatattaatttcgcggggtgtgcctgaagagagaattctatttttaaacttgatagcaagtccggagggcattgaaaggttctcgaaaaagtttccaacattgcggattgttactgcatttattgaccagggacttgattccaagaaatatattatacctggtctaggcgacttcggcgaccgatattacaccatttag

SEQ ID NO: 82 - DNA, 1344 bp, Golovinomyces orontii
  source 1..1344: mol_type = genomic DNA
atgtcggactgtaagctcaaagaagcacattattctcctccttgggccgatgtttgcataattggtatcgccggcagctccggttcaggaaaatccacgctatccaacgcaattgttgctaagatgaatcttccctgggttgtaattcttccaatggactctttctacaaaccacttaattcagagttttcccaaaaggccttccaaaatgaatatgactttgatagtcctgatgctatcgattttgagatacttcttgatagattacacaacttaaaagccggcaagattgctgaaatcccaagatattctttctcgaatcatgcccgggaaatcgagacaacctctatatactcgccgcacgttcttatactggaagggatatttgcactctatgacccccgagtcttagcacttttagacatgaagatattttgcgaagcagacaccgatacctgcctatctcgaagaatccttagagatttacgagaacgtggcagagatgtagaaggctgcctaaaacaatggttttcattcgtgaagccaaacttcgaacgctatgtcgagccacagaggaaagttgctgatatcattgttcctcgaggtgtagaaaataaagttgctattttaatggtcactcaatatattgaccaaaaactcttggagaaatcaaaaattcaccgagccaagcttcaaatgctggggcagagttttgaagatcatcaattgtcacatagagtaatcctacttaaagacaccccgcagctccaagcaatgaatacaattattcaggatggttcgacatctatagaagatttcgtcttctattttgataggattactacactacttatcgaatgtgctcttaacaatgcctttacaatggaaaaagtcgtccacactccgacaggtcaaacatttaatggagttgaaaccacagctgagataagtgctattgtagttcttcgtggaggatcggcatttgaaccaggattgaaaagagtcttacctgattgtccggtcgggagaatccttattcaatcaaacgtctatagcggtgaaccagaacttcactatctaaaacttcctgaaagaatcaattcccacggaaccgttctaatacttgatccccaaatgtctagtggaggagctgccttgatggcagttcaagttctcatagaccatgggttagacaagaatcggatgatttttgtcacttatttcgctggaaagatgggcttaaatagacttacgcatgtttttccagaacttccggttgtggtctgcaaggtcttgagtgataagcaagagcgctggatcgagaaaaagtattttggttgctag

SEQ ID NO: 83 - DNA, 1239 bp, Golovinomyces orontii
  source 1..1239: mol_type = genomic DNA
atgtcagaaaattacatcggtaccctcatacccttgaggactcggtcagaagtcacggcgcgcgatcaagttattgatgtttgggtggttggcctgcgggtgaaaatggcaagtggaattttaagcctgatccgatcgaacttccctgaaaatagaagtatcaacttgcagcatctaagacgatttgccaagtttgaagaattgcctgagacggtcccgaattcctctcataacttttcgccagatgatgaaaagcaccttctccttgttgtctgtccaattgatttgatctcgcaagaatctcttgtgatgatgctctctccaatagatgcgactacgtctcctattattatctcgacttcagtaccccttttagcccctacctcattcgcacaggctaaaaagtggactgagactcattggccgacaatttacaagaagaataatccatttggtccccaccccagcatagtttcgcgtgctcaagaagaaattgcaccagaagtaaataaatggatggatctcgcttggagactagctagagaatcaagtgagtcctgcaggggagaggctatcggcgttgttgtagtagagcgaaaacatggctcgggaaaagtaatatctgctgcgggagatgctaggtggcttgattgggcgggatatagagttggcaaaggaaacccagctgcgcatgctgtgatgagagcaatcgctaagattgccgtaattgttcgacacagggatctaaaaaagagggaggggaaacccagtcttggtttggataatgaagaatcggttacaaaatacagtagaaatactcaagtaacggagagagccagtgagcaagatactgacctactgaaatcagtctctactgataattcttgtattttttatgagaaccatgtttctaaaatggaaagtcaatacgatgacccttccgcgaacgaaataggatatctgtgtcaagatctagagatttattgtacacatgaaccgtgtgtcatgtgctccatggcgatggtgcactcaagattcagacgcgttgtctttgagatttgcatgccatacacaggaggattaactgccgatgggatgctgggatatggccttttttggaggaaagaactaaattggactatgctcgcttggcaaaggcagaatcctgcacttactaccactttacctaatgctgaagctgctacaaacagatcagaagacccggatctcgaagcgtaa

SEQ ID NO: 84 - DNA, 1386 bp, Golovinomyces orontii
  source 1..1386: mol_type = genomic DNA
atgaagcaaaaatcttcatcaactctcaactccttagatacgtttgttgcccataaagaagcagatggcagtgatattcatcaacccgtcgtacctgaatcaggaaaagccgacgctgaacattgtccattctcatggatagattatagtatctttgtgctgctagggatatcgatgctttgggcttggaacatgttcttagctgctgctccgtactttaagtcacgatttgccgggagcaaaaccatacttatgaactttcaagccgccatcacgtccgttagttgtatcacgggttttttctctatgttcatcctcaccagaatgcaagcaaaagcaaattatcctaaaaggatcgttataggcttgattatatgtgtattcgtattcgtcctactttctatatcaactcttcatttccgtggtgtatccgagactttttactttatattcactttaatcatggtatttgctgcggcactatcgactagtttctctcaaaacggcgctttcgcattcgctgccggtatcgggagacccgagtacattcaagccatgttgactggccaggcgatcgccggtgttttaccctcggttgcccagattatatcagtctacagtgttgccaagaccgacaaattagcaaccgctgatgaacttctcgcagcttctcttaaagagaatacttcagcagcccttaaatactttatcaccgcaacagttatcagcttgatgacttctgtatccattatacctataattcgaaaacacagacgcacattcgagccccaaatcaccaactcctcagcaaacacttcaagtgagccagagagttctactcggcaggtgatttctatgaggacactgtataagaaacttcgctggctagcggctgccgtcttcctttgtttggttattaccatgttctttcccgtctttacagaaagaattgtctcagttacccctgaggagagtgctcctcaattactccgatcagctatatttattccaatggcgtttctgatttggaatgttggagacttaataggtcgtctacttagtcttctgccatggaaaggattcaatcttaagccagtgactctattcgttttagcctcacttcgtgccgtctacgtacctctctactttctttgcaatataggaggccgaggcgcaatcgtaaacagcgatgcgttttatctagtctttgtctctgcgggatttggcttcacaaacggcttacttagcagcctgtgtctgataaaagctggagattatgtgctggaagaagagcgcgaggcttcaggtggatttatgattgtcaatctacaggctggattaatggtcgggtcattattaagttttgttttttctggagcgggatag

SEQ ID NO: 85 - DNA, 1578 bp, Golovinomyces orontii
  source 1..1578: mol_type = genomic DNA
atgggtctcatcgaaaccatttcgaaaccatttgtcctacaaacctcaaagcgagggacagtgctggaaatactgtgtattggttgcttattatgtctactggttgtggtcgttaacgtgctgaaacaattattgtttcgcaaccctcatgaacctccagttgtatttcattggtttcccgtgattggaaacgctatttcgtacggaattgatccttacagatttttccttgactgtagagccaaatatggggatatttacactttcattctttttgggaagaagacgacagtgtatttgggtcgacaaggaaataacttcatattgaacggaaagttaaaagatgtaaacgctgaaaaaatatacaatgtgttaacaactccggtattcgggaaggacgttgtctatgactgtccaaactcaaagttgatggagcaaaagaagttcatgaaaacatgcctaagcaccgaagctttccgctcgtacgtgcccataattcaaaatgaggtagaaaattacgtgaagaagtgtcccagcttcaaaggacaaaaaggcaccgttaatataactgaagttatggctgaaatcactatctacactgcttcgcatactctacaaggaaaacaggttcgtgacaggtttgattcctcttttgccgctctctatcatgacctcgatatggggttcaccccaattaattttgtgctgcattgggcaccacttcctcacaatcgggctcgtgaccttgcacagaaaaccgtagcaagaatgtatatggatataattcagagccgcagagcagagaaagagaggtgcgaggaagagcacgatataatgtggcatctaatgcgatcaaaatacaaagatggaactccggttcctgaccgagagattgcacacatgatgattgctctcctgatggctggacagcactcctcttcatcgagtagttcatggtttatgctttggttggcagctcgtcctgatataacggaggagctataccaggaacagcttgaagttttcgggtcggataagaccctcccaccactgaaatatgaagatttgtcacggcttcgacttcaccaaaatgcactcagagaggtgcttcggctccatactcccatccattctatcttacgacaggtcatgagcccgatgcctgttgaaggaaccaattacgtcatcccaccgtctcactcccttctctcgtctcccggatgtactagtcgtgatcccgcgtttttccctaacccccttcaatgggatcctcatcgttgggatccagaatctggaggagttactgttgcagatgttgatgatgagaaatttgattatggatttggtctaatcagtacgggcgcatcgagtccttacctgccttttggtgctggacggcatcgctgcattggcgaacaatttgcgattgtgcagctcgtgactatcatggcaaccatggttcgtttgtttaaatttcacaatgtagatgggaggaaaggtgttgttgatacagactactcaagccttttctcacgaccgctgtcaccagcggtgattggatgggaaaagcgggaatag

SEQ ID NO: 86 - DNA, 1140 bp, Golovinomyces orontii
  source 1..1140: mol_type = genomic DNA
atgtctattacagctcataaattcgatcaactgagccagcagattaaacttatcacggctgatggcattgtgccagcagcaatcctcaaagacgagcttaaaaattggaatttctacaatgttcaagcgtcaatcagctttggtttccagtcgggtgccttctgtattatgtttattatgacggcagtgctcaccaggagtactagacgacgtacgccagtgcatatcctcaatctattatctttagctttagggtttttccgtggcttatttcaagctttatacttcaccagtaattggaacgggttcttggcttattttgcccaagactacagtgaggtcacaaagcacgactatactcttagcatcttttctatcatcactccagtacttttcgccacaactgtaactagctcgctggtacttcaagctcacacagtgactaagcttgcaactcagaaatggcattttctcactatcttcacctcagtcttggtcctattaattgctactggcttccgcttcgcaaacgccattttgaactgcagagcagtcattcacacagaatcatattttgaatatcagtggctacagctttcggttttaatcacagaaacgattaccatctggttctttagcctcatttttactggaaaacttatttacaccatttggattcggaaaaacctaggcttgactcgctgggatcacttacagatcttgagtgttatgagtgcatgtactatgatcattccttctgtctttgccctggttcattacattgacatcccaacatttccatctattgatacatggcctcttgcaattgtggcactactacttccactctctgctctctgggcatctatggttatcaacgatcccatacctggctttgatatttccagaatttggagtaatcaatcccagatgatttgtaccaagtgtggttatgatcctctaatgggaaaatcaaattatcatgattcagaatccagctcccacaaaactgatgaaagcactatcaagagtccctgctccgctacaaaagctatccctcaagtgactcctattcacaattgtgttgagggcgatctgaggaaaataggtccatgctataaagaaaaaaaccaatgctag

SEQ ID NO: 87 - DNA, 969 bp, Golovinomyces orontii
  source 1..969: mol_type = genomic DNA
atgcctctacgaagaatactaaagaagtcaaaatacgccaaaaagagtccagaagaagagactgtcataacacccatcttatttatgcgtagcgacacaaaaacagaggagattatttatccacctagttatcctgatcatgaagaatccttacgcagtaaaaaggggcgaaacaagaaggaaatacctaggaccccttcggaatctcgtaaatcatctcttagactcaagccaaactttctgaaaaaccagaaatccgaaaaggtgccagaaaatctgccagatatagagatcattgctgatcaggtcgagaggagaatcagggcacaatgggaaaaacgtgcgacaattctagccaaaagaaatgaggaaacaacagctaagtatctatcaatcactgacgataaacatgcaaaggaggtgagaatggcgagagagctggacgaggcaaattcggccaacgataacattatagaagcaattagactacatgaagcggggagccggctggcggagttccaaaatgagaataataccctcagtcaagtattgtacggtctttctttaaggtacgcatggctggggatgtactccagatccggaaaaggcactcaaataccttcagctgcagcatcgtgtgcagcctcaatcgaggatttagcacttagggcggggaagaaaagtggaggagcagcgaaagatgaattagttcttgctatttacgagctcgcaaatagttttagacatggctggggaattccgatcgaccgagtggctgcgaaacagtactatgagacggcagctaatttgggtgatacggacgctatgaatgaagtggcccgatgttatgccgaaggaatcggttgcaagaaagacatgtttgtggctgctaaatactacaggatggctgagagtaagggtaacaaaatcattggaaactcctggtacgttgcaatttttgctctctaa

SEQ ID NO: 88 - DNA, 678 bp, Golovinomyces orontii
  source 1..678: mol_type = genomic DNA
atggcattccgcttaacaagaggtgctgcaggtaagctttcatctagaaatactttaatccttccggtatccatttctggtcgccgatcaacgtcttccgttcctattcctgaaccaaaaaaaaaggctcagtctattctagattctttacctggaaattctttgatctccaagacagctattctctcatcaacagccggagttgcaatttacgcattaagtaatgaatattatgtagtaaatgaagagacagtcgtcgctttctgcttgttgagcatttggacagccgtttttaagtatggaggaccaatgtacaaagaatgggcagatgggcaagtcaacaaaatcaagaatattttgaatactgctcgtgtcggtcacaccgagctgttaagaacagaattgagagtgtcaaacagttttctagtgttgttgatatcactaaaaccctatttgaaatttcaaagaacagaaaacgccctcgcttctgaggctaaagccgttcttgattcatgggttagatatgagggacaagtaaagatacgcgagcagaaagaactatccgagaccgtgatctcaaagattcagaaagaactagaaaatcccaaggttcttcaacaaatcttacaacaaagcgttgcagatgttgagagaattcttcaatcaaaaccacaataa

SEQ ID NO: 89 - DNA, 945 bp, Golovinomyces orontii
  source 1..945: mol_type = genomic DNA
atgagtaaagacggagaagcagtgaagcaatccgtaatgggagtgcccccattcgtcattgacttcctcatgggtggtgtatccgccgcagtctcaaaaactgctgcagctccaattgagcgtgtcaaactattgatacaaaatcaggaagaaatgattaaatcagggcgacttgacagaaagtacgaaggaattggcgactgcttcaaaagagttactgcaaacgaaggatttgcttccttatggcgcggaaacacagcgaacgttattcgatacttcccaacacaagccttgaactttgctttccgtgatacatacaagtcgatgttcaacttcaagaaagatcgtgatggatacgcaaagtggatggctggtaacctggcatctggaggagccgctggtgctacttctctcttatttgtatactctttagattacgctcgtacccggctagcaaacgataataagagcgctaagtctggtggcgaacgtcaattcaacggtttagtggatgtctacaagaaaactctaacctcagatggtatcgctggtctatatcgtggttttatgccttcggttctcggcatagtcgtctaccgtggattatacttcggaatgtacgattcagtcaaacccgttttacttgttggacctctcgaaggtaacttcctcgcctctttccttctaggatggactgtaaccactggtgctggaattgcatcatatccattggacactattcgtcgtcgcatgatgatgacatctggtgaagctgtcaagtacaagtcatcccttgacgctggacgacaaattgtagccaaggaaggagtaaaatctctattcaagggagctggtgccaatatcctccgtggtgttgcaggtgctggtgtcttgtcgatttacgatcaattgcaggtgctcatgttcggaaaagcattcaagtag

SEQ ID NO: 90 - DNA, 1092 bp, Golovinomyces orontii
  source 1..1092: mol_type = genomic DNA
atgtatcctgctggatcgttaagactgcttagaatccgaccctctgttactcaattcacccaggcgctagctagaccgcctattacgcatacggtctttagagcagatctaaattccaaccttgtacgcgccataaatagatcttacataaacagacaattttcctccactccgcgcgcttggctccgggattgctttccacaagccgatcatgagcacatcaagaagacagaggctgcgtggccgcatccacaatattcgatagagcagatgcagactaatatagcatatgcccatcgaaaacccgaagatttctctgatcgtattgctctattcttggttcgtttcctcaggttttgtaccgactttgcaactggctataaacatgaatctactgtcccgacagtggcgggcgaatcgtcggcagtgagtgaagctaagccttacaggatgagcgagcggaaatggctcatacgcatggtgtttctggaatcagttgcaggagtcccaggaatggtagcaggtatgcttagacatctacattccctccgacgcctaaaacgtgataatgggtggattgaaactctactcgaggaagcttacaatgagcgaatgcacttgctcacctttctgaaaatggcagaaccgggctggttcatgaagatgatgattataggtgcacaaggagtgtttttcaacagcatgtttctatcatatctcatctctccacgtacatgccaccgcttcgtggcttacttggaagaggaggctgtacttacctatacacttgccattcatgatattgaaactgggaagttacctcattggagtaatcctgcatttcgaattcctgatatcgcagtaaattactggaaaataccagaaggtagtcggactatgcgcgatctcctactatacatacgagcagacgaagctaagcatcgagaggtcaatcataccttgggaaatctcgatcagaatgaagacccaaatccatttgtgagcacctacaaaaattcaattgtacctcatccaggaaagtctattgaccacattcgacccactggctgggaacgaaatgaagttatttaa

SEQ ID NO: 91 - DNA, 1740 bp, Golovinomyces orontii
  source 1..1740: mol_type = genomic DNA
atgtctttcgcagtgcgatcagctcataggattcccagctcgtcacaagcatttaatgttatttcacgtcgagcttatttcaaatctcccagattattacctcaaaaatatgcatttctaagtcctacctataagctagcattgagtagatgttcaattcagcagagctaccgtcgcacttatgctgatacagcgcaaataaagaaacgcaaaggcttcacaagtataaaacttgtgtggagggttctctatatctctcttattggaggagttgcctattttgcctacggtgtttacgatcttcgcaatcctggcgaccagcttgtaccagacccctcaaaaaagaatcttgtcattttgggtactggatggggagctgtctctctgctcaaaaagctcgacactgagaactacaatgtaactatcatctcacctcgcaactacttccttttcactcctcttctcccatcatgtacaactggaactatcgaacaccgatctatcatggagcctattcgaagtgtgatgaggcataaaaagtcagccgtcaagtttttcgaatcagaagctactcaaattaatccggatcgcaaggtcgtttgcataaatgacaaatctgaaactagcggtgaattaaaccataccgaggtgccatatgatatgcttgttgttagtgttggcgctgagaatgctacatttggaattcctggagttcgcgaaaatgcatgctttctaaaagaaattggagatgcacaacagatccgcaagaagataatggattgtgttgaaagtgctgcatttaaagatcagagtcctgaagaaatcaaccgcctcctacacatggtagttgtgggtggtggacctacaggtgttgaatttgctggtgaactccaagatttcatcgaccaggacatcaagaaatggattcccgaaatttctgataaatttaaagtcaccttaattgaagctcttcctaatgttttaccgatgttttcaaagcagttaattgaatatactgaatctacattcaaagaggagaagatcaacgtcaagaccaaaacatctgttaagaaagtaacagacaagactgtagaggctgaggtaacagggcctgatggaaagaaaagattagaagtatttccttatggtttacttgtctgggctactggtaatgcagtccgccccgttgtccgggatctgatggctcgtataccagctcaaaaagactctcgtcggggtctttctgttaatgaatatctggtagtacaaggagcaaaagatatatgggcaataggtgattgcgcagttgcagggtatgcaccaacggctcaagttgccggtcaagaaggtgcctttttggctcgcttattcaacactctggctaaatctgaggctatagagtctaagatcaatgaactttctttatctcttaacataaagcctgggaacacatccaaggacgccgaagaaataaagcaccttgaaaagcagttgaagcatatcaaggatatcaagccctttaaatacactcatcaaggtagcctggcctatatcggtagtgaaagggccgtagcagatatcagttggtttaatgggaactttgcgagtggaggtagcttgacatatctgttctggagaagtgcgtatttaagtatgtgcttcagtacacgaaatcgcatccttgttgttcttgactggttaaagtcaaaagctttcggacgagatgtatctagagaatga

SEQ ID NO: 92 - DNA, 1557 bp, Golovinomyces orontii
  source 1..1557: mol_type = genomic DNA
atgacggctaagacattagcccaaaaaatctctgagttgaacaatccagtaaaccaggatttcgatcccgaagatgaagttaatcccaatgaagaagaagacacagatagtgaggatgaacacagccatgatgatctaactggaacggagcactatgctcagagccaactgaggaatcccgaagaagttaatttaggactcaaatattctggttctaggataagtcgtaaggacttgataaaagacgaggaaaatctcgaggataaaaactttaaaagttttccaaatgattcgagctctgtagtatcttcaaatactgaagatgatgtaaccgaaaatgaatcggtagataaattcaaagatgtcgaatcttctgatgatggtggcaaggggaaaaataattgcaaaatttctcgcgacagaaaaactgcaaaagggcttgttttagaaggcatattgaagaggaaaaataaaaaaagtaattccgaaggagagtattcatcagaaactcaggtttcagaatactcggacgatcaactcaactctgataatcttgaagatgaagaatctgatagtgatgatgatgatgatattggagatgaaagaaccgaacgatccgaaattcagaaaatcatgaaagaagatcaaaagaccgtggtatcaacaatatctcaagcagtaaaagcagatgttgaaaagggtaaagctgtcaaggctcagcgaatgagattcgattgtttgttaaatgtacgaatggcaatgcaaaaagctttagtagctgttaactctatagctgctttgaaagatgataacaaccatgacctcagtaatattccttacgagtcagctgaagaagcagccgttaagctttggaatagaatgaacgatttccggcaagatatatcaaaggctacatccaagcataaaactggtcaaaaaagaaaacgtggtatcgaactcacaacaccttctgcggttatctgggaaaaactaaaagacttggaggtggcctccattgatcatcgtcaggctattctcgaaaaatggtctgctaaaacccggggtatttctgccctacctctctcagagaagcttaaaccaatggcagctcagcaaactattacacttctcttaaatgatcaacttgccaactctgagaaattaataaaacgtacaaagatacctcgctcatgtgctcctattcaaagagacttaaagcttgaatttatcgaacaaagaaaagcagattcattaaatatgctaccagttggcaataaagaaaacaggactttccaatggaacgcgatgaaagaagccaaaacccgaaaggttgtggatacacgtgcaagtaaagggagaaaaatgcgttttaccgttcacgaaaatcttcaaaacttcgctgctcctgaagaccgaagatcgtgggaaagtgtagcaatcgatagactttttggtacacttttaggaaagaaattaagtcttgatgaagatagacaagatggggaaagtgataatgaaatgaaggaagaaaaaagtctgaggttgtttagatcatag

SEQ ID NO: 93 - DNA, 1356 bp, Golovinomyces orontii
  source 1..1356: mol_type = genomic DNA
atgacttcccttggcttggtgactcgaaaagaatgggttgttccgccacgaccaaaaccaggacggaagccagcaacagatactccacccactaaaagaaaagcccagaatcgagcggcccaacgtgcatttagagagaggcgtgccgctagagttggggagttagaaggtcaactcgaacaggcgagagaagaacaacaaaacctcgaagcggagttacgaagccagattaaacagttggaggcagaagttgaacgttttaaacttgaaatagattcctggaaatcaaggtgcgatattctagattcaattgttacttacgaaaagagagcgaaagaggccgctctagctgaattaatgttcttacgggagggttcccaagcgaccgggactgattctgttttactccctctcaggatggttcgatcagcaacaaacaagcaagaatctaacagttctaatattactttgtctgataatgggcctaatacaactacagttgatgttcagactacaaagagtgaagatgcacatattgacgaggctcctgaaagcattgaactacaatgcggcaattgtactctagatagcagttgcgcatgcttagaagaggctttaaatggaagtctaacaacgtgttcaacctcagaatataaaagatcacattctcctacagcgaataaccttcccgataaacgttctcgtccatcggagtcttgtaccccacttgaaatcgatttcacgacacaatttgccccaaagggagtcatgaaaatgcccgaattaatggaaaaaataccgccaatagagtcatgtggcttctgtgatgatggaacatactgcttatgtgctgaagctattgccacgagcaacgaacaacgtgttccttttatcagtgaggtttcttcctctatattagcaagcgtcggcgactctaagcagccgttttatgaaaagatccttccacaacaagaagtatcgaaagagaatggtcctggaacatgtcagcaatgccgagcggatcctagatcagggaaattctgtcgctccctttcagcactaagaggatctgattgttcaaaaattccagaaggttgctgcaaaaaaatgaggagtctctgctgcatgacaacaaataaatcccccatggaacctccacgtctctcatgtgctgatgcatataagacattatccagtcacaagaattacgatcaagcagataacgaacttggtacttggcttggacgcctcaatgccacaccccctgctcatcctgggcgaggagcgttggaagtcgaagctgcgagtgtgatggaagtattgaagctatttgatagacgatttacaaaaaaatga

SEQ ID NO: 94 - DNA, 1239 bp, Golovinomyces orontii
  source 1..1239: mol_type = genomic DNA
atggcagaccaaataatctctaagttgaaccccgactcacatcttattcttgatcaaccttttctccgtcttccatttgaactgttgcgaaagaacttcaaggctgcccatttcagtgttgaaaaagaaagtacggtcgttaagagtacattaaaagatactacacatgcatccatatccgctggtgcatctctcgatggagttctcaagaattttgattcaatgctctcacgtattcgaggtctcaaacgaaagttaatttcttgtgcagaggaagagaccagactacaacaaaattcactcagccgcatacgacatctaagggagttgtatgaaatgaagagtcttgatgatgtcaaatatgaagaatggagccgcatacgtttggacagattaattgttgattatctattgaggaacggatttgaagacagtgcaatagcattggcaaaagagaaacgtatcgagagcttggtggacgtggatacttttatacaaatgaaccgaatacgtgaaagtctcctaaatgagagtgtggcggaagccttagcatggtgccatgaaaacaaaaaagacctgaggagaatggagagcaacctcgaattcctgctccgtttccagcagtatatcgaattagtacgatcgcaggatccagcaaagcttttagaatctatttcccacattaacaagtaccttctaccatatcgctcatcctacccacgagagttacgacaagcatgcggactgcttgcgttcttacctggaacccgggcaccagcctacgccgtactctatagccaagatcgctggcagatactcgccaacctcttttaccaaactcacaatacgcttctttctctcccctcctcaccattattacaaatcgctttatctgctggtttatccgctttgaagacaccttcctgccattctcagaaaaaaaatactgccgtagcacaatcatccaacacatccacctgcgtctcctcactcacagcgtcgatctgtcctatctgtagcaccgaacttaactccctcgccaaagacgttccttacgcccatcatactaagagccacgttgcaagtgacttagtgatgcttcctaacggctatgtgtaccgcaagcagtggttaaaagattacagcgaaaaagctggtcttccggaaggaaaattcaagaatactagcgaaggaaaaatctacagtgaatgggagttgaaaaaactattcatcacataa

SEQ ID NO: 95 - DNA, 1326 bp, Golovinomyces orontii
  source 1..1326: mol_type = genomic DNA
atgcgaatcacatgcaaggagacaatcctcaatcatcaaaattggctgaatcaatccatttcccataatccaaatacttttgatacggcatctcgcgaactttgtggttcaagttctgggagtacgctgtcaattgacgatgctgacgtgcggctagctgctgaagctcttggagatctacgagcagatttcataatttcaccactacaacagcgcaattctaaatccacgtacgataatgaagacaaaaaaccagaacctctgctttctctactcaccacatcgcatcctctgatcggaaacgcgatcggcggatcactatcggcttactcagcctcaaaaaagtacagtcctcgatttaaatctagcgcagagtatgtagaaaggagattcacacctgtagtaaatactgtgggctcagttggtcgtctaactggtgtagaaggaggtgtacgttggattcttggcggaagaaactctccggcgctatctgaatctaagaattgtattgaatcttcaaataagcgcagaaagctggatgaagataatattgacggcagctccatagcagacagcacttcagctcactggcgccgccacagtcaaagttcaacttctgaaagtttacctgcatatgacgaattgagatgtccaatctacgagctaaaccaagctctcgtcacacccggatccatacaagaccaaagctcatctaatttctcctggcagtcaaggctagttttatcaacaagcggcctcagtatttcgatgagcgaagagtctctacggcgcttaaaatatttaatcttggcactaagagcagcaatagaacagtatgatcttgaacatggcggagagatttctgcaaagaaaggagacgaaaaaaaaatccttcagaatgaagctgagcgcattactttaaacacaaaaataacagaactaaagcaggatgttttgaagactttgaaagatgttgtagacaccgtgtcaaagtatgcaggtggtgcattacctgaaaatgctcgcgtgttagtgcgtcgtcatttgacgagcttgccacaaagattttgcattgcaagctctaaacccacggatattaaaaatcagactaataacgttgatctcaagatagtagaaggtggccgcaaagtattgctcctcgctggggaaggccttgacatgatggcccaagtctcatgtgttctcaatagtactattataagcgcagaggattggtgtgaacgtctaggccgatctagacgaatggccagagaaggcgagcacgacagtgcagggaccaatgagaagctgccgctcgagatctaa

SEQ ID NO: 96 - DNA, 1212 bp, Golovinomyces orontii
  source 1..1212: mol_type = genomic DNA
atggacgtcatggaactcgttgagaacgaacctaatgcaaggccttttcagtgcgattggcaaaagtgtaataagagcttcaatcgaaaatccgatctgcagcgccattatcgaattcataccaatgaacgtccctactcatgcttacagccaggatgtggaaagagctttatacagagaagcgccttgactgtacacattcgaactcatacgggcgagaaaccacatcagtgtcaacatattggctgtggcaagcgattttcagattcatcgagtctggctcgtcatcgccgtattcatactggaaaacgtccgtacaaatgtgctcacgagggatgcctgaagtctttttgtcgtaagacaaccatggtaaaacatcaaagacgctcacatcaacgtggaatcaactcttcagagacagatgattgtgatacttctgattcagattctggtgattctccttcgacgcctcaacactcagcccatatgcaatggtcccacgggcccccgcctgcccatggcatcatgcctaattctcttcaacatcagaatcaacagattcatcggtcacaatcctacaatgactttcatcagatagacggctttaacatgggacagacgtaccgaccaaatttcacaaccaaccagttcaatcattcgttgtccgagcctgatcaccctctaataaatcgatcaaataatttatctgctccaccaggatactatgtgacagaccaaaacaatcctggagtcgtcactctaaatatcaaccatccatccatcaatacatacgtccctcgacagcaaattgacaccaaggacgcaagcattgacagtagctcgattagttcatctcctatctctcgctctagccctgatgtctactattcgcatcagtctcatcaacccagttactcacttcacaactctcaccaacttgaccagtcatcaatgatgcaataccaaccagtgccacctcttacccagcaccagcaaacaatggcaaatcaaatctcccaacagacacaaattaattctcaattcccatcgccaggatctcaagcaagccaatggtatgaaacttctcagtaccaacaccctgaattaataggcatatatccttcatcgaatttccagccgtatttggaaaaaatcgaatccttcgatgatccggcttttcaattaccaagttcgcgactagatacgatgtaa

SEQ ID NO: 97 - DNA, 1236 bp, Golovinomyces orontii
  source 1..1236: mol_type = genomic DNA
atgcctcttcctactcaaacacaaatttcttcaacttacgccagttcctatataccactagcctcatcaagaacgctgatccaagaatccattcatgctacaaatgatgtattggccccgctacccccaggaggccaaccaccaccggcagaaccaacaccaacctcatgccatctaaacgggaagaaataccaattggtcgtcgtccaacaacctcaacgtgcgcgaatgtgtggctttggagataaggaccgccgtccgataacaccaccaccttgtgtaaagctgattgttaccgatcttgacactggcaaagagtcagatttcaatactatcgagcatggtatgtttgtgttgaatgtagatctctggtccgcggatggaaaatcggaagtcaatctcgtaagacaaacggcgaactcaccatccatttcttccaccatttccataccctatcaagacagtaattctaatgctacgtatcacccatccaatggagttaaatcagaatctggacaaccttcttataataatcactatccatcaaatgactcaaattcgaccagcttatataattctcaggttcaaaactacaacggccagtctccatactcgcaaagttacggacaatcgaacagccagacatatcaaccatcaagtggcttctcgcatcccccaacccctcagcaaatgtacttcacaggctcgggtatccatgccgcctcatcaccatcaagtcagtacgctgatccagctcagggtcaactctcgccatacccaactcggagctacacctcccaagagcctacccaccgtgatcctgtcaataatcaaccccagggtatgtttacacggaacctaatcggtagcctagctgctagcgcattcagattgaccgatcctgaagacaagattggtatctggtttgtcttgcaggatctatctgtccgtaccgaaggtgattttagacttcgtttctccttcgtaaatgttagtgaaatatctccaccttcttgtgccctaaatggaaatggcaatacggccatcaacaaaagtaagtcacctgtgcttgcacgctgcttctcagacgttttcagcgtttattcagcaaagcgctttcctggggttgttgagagtactcctcttagtagatgctttgctactcaaggaatcaggattccaatccgcaaagatgcagcaaagggagataaagaaaaagatgacgaagatgactga

SEQ ID NO: 98 - DNA, 1827 bp, Golovinomyces orontii
  source 1..1827: mol_type = genomic DNA
atgcttgtgcaactccttcaacctgactccgggttactacttagtcaaaatcctcactataatccggcttatcgtcagagaagaaaagatccaagctgcgatgcctgtagagaacgaaaagtcaaatgtgacgccacagagacgattagctgctcggaatgcttgagccgtaatgtcaaatgtcaatttacgaaagagacgaataggcgaatgtcatcaatcaaacaacttcaagatttagagagacaagtttcccaaatgaaaagggaaaacttacaactaagatctatgctaagtatgcaagattgcagagattgcacgaaaaatgaaggacttcacaaatcaccgctagagcttccagagatcggatccggcccaaagaaacggttacgacctccatctcttcgaggattctcgagagtacaatctaatattcgtaaatatggtaaagggattctcaaactaccagaaaaatcccaagtaccaggacaatcaaatttattttcatctccaaaaccggatcttcccccaaaacatatttctgaccaaattttaaactcttactacagctcgattcatctagtgatgccaataattcactggccaacttttatacaggagtatgaaaatgcatacaaagctttaagtcctaatagcttaacacctgtatggatatctacatttttcgccgtacttgcggtcgggtcattattcaataaggaacagttaaatcagagaccacaaataggcagaaaatacatagatatttcccgaattcaaatagacagttggagcgatgattttacgattgatcatcattttcttgccgagataaatttgaaatctgcagctcgaaaatggctagctctgctgtttatagagtctatttcttggtctactctcgagacagaaatgcgacgtagagtgtggtggggagtttacatttgggatcgacatatctcgctagagtacggccgtcctcctttcattgacgatgatgattgtgatgttaatcttccgactgcggccgtccctaaatcaccaattatccctgattcatcactacggatatttgacgctcatttttcagcctgcatatcagcttttccgccttcatttctactaaattctcaggaaccattggatcctcaggcacttgttccagtgtgctatcttatgaattcacgattaattcttcatcgacacaatctcacaaccttctgcccactcgaaacgagatttaatgccctggatcaatgtattcgcacgtctcttgactcagccgctctgatatctcgagctatggcctggtcagaattatcacaatcttttgggacgggggcgcatgcaatgacatgtacacatatatggcgttgccactatgatgctgcccttacttgcattagagcctcgtcagtcataggtactcttcgagatgtaaatatttgtgtggtcgaaatactgccttttttctcgatagagcatcagcaacttgacgaggaattaattgcatacgtatctggcgatttgcaggggaacaaccacaacagttgggtttggcagagctctgagattggcctagatgttgatggagatctagctgagacagaagaaagtactagcaaactcacagagacagaatcaagagactggggaggctggcaacgagtcgagtacctcgttggagtgctggctcaagagtctgatgggtataacaaaattaaatcataccctcattatagttccggaccatcaagtgccgatttagaatctccgccagaacgtatgaagggctgcgagagaatgagcattacaaatatcatatga

SEQ ID NO: 99 - DNA, 1020 bp, Golovinomyces orontii
  source 1..1020: mol_type = genomic DNA
atgcaaccgataatttttccttttgaagacgactacatttcatctgaagattcagatttcgatccgggtcgcaatacgtcaaaggacagtgatagatcatctaatgaagaatctgagtcggatgaccacaccaaagatgcatctatcaataaaagaagatctctctctcaaaaaagaaatgagaattccgagacaagagattcacgaaataaaactgttagagttcgcacaggaaaaaagataaatgagaagaatattgagtcaagtaatgatgttgatgttgatcaatataatagtggggaaggtttatttgtaaagacaaggagtaagctcgcacaggaaaaatgtcaaatgaaagatttaaatgctgtcgaagtttcaacaacgattgatgtagacgcagtatgggaagcgatgaaaatggggaaaccattgccgaacctaaaggaatcaccagtcttccagtctgaattctcacagtctcaaaaatcagatgattcgatagacagtcatgagaagatgccccctcctgatatgatacttgacgatgcacacgactcgactatcacaatcaacagggtatataaatttgctgggaagacccattccgagcagaaagttgtagcaagtaattctgctgaggcaaagctctaccttaaaacaaatcccgataactcgggtgcttctacatcttcgaagccgaaacgccccccaaagcttgctcgaagatcaatatttgagccagttaacgaagctttaccacagagaagcgatctgtgtctcgggattagaaaaacaacattgacgtcagttgatccatcgagtcccgaaaaaaagctcaacacagttgagaaaagcgccttggattgggcaagctttgtcgataaggaaggtattgcccatcaactagatgctgcaggtaaaagtaaagatgccttcaaggcacgtcaagaatttttggctcgagtcgaatggaaaaaggaatatgacaatcgcagggcaagagggttacccgtctga

SEQ ID NO: 100 - DNA, 1925 bp, Golovinomyces orontii
  source 1..1925: mol_type = genomic DNA
ttggcgtttgccgagttgtttaaaggcctacaaaattgacattgtgttaatttttttgaacgagtaatctagccaattaattaatcgaatactctctgcctgacgcgggtagctggagtactttgacaaggctaagcgagtaattactaactcttgatcccattagcaacaagcgagtcgtcgctcaagttaatacggttgatggtcatcattacgttcacgtatccataacagatatcctaaaccaagtttgtgtaatagcaactactgtggaataagaaaactttattacaaagtgcctcagtgaccttcggggccggctaggctgcagatacttatccagaaattccaaacaaaagctctcaatatcgagaaaatattacttgataactattctttattattatcaatataccttttcatagttctttttgcctagtttcatatagctagtatggcatataatgatgacgcagtattggcaaagctctcagcgttaaacgagacgcaggaaagcattgtcaccgtcgcacaatgggttatgtttcataggcgacacgctgatcgaaccggtcagttgtggctgcagaggctgaaagattcggggagcaacaagagattaaacctcatctacctagctaatgaagttgctcaacaatctaaagcacgtcgcaaagatgacttcttgatcgctttttcacctgttattgcagaagctaccgcaaccgcatacaaaggagctactagcgaggtacaaaataaactacggagagtggtagaagtctggagacagaggcaaatctttgaattacccattcaagaggctattgaagctaggatcgatgagttagataaatccagatcctcctcgactaaacgtggaggagtatcaatattctcatcgaatagtaatgatgtcccaaaagaattagttcctttggttgctccgcagcaagcactgtcaaaattagttctttcaacaatgacttccacaaaagccgccgctcaggattatgaaaaacttacagatcctaatcatcttgtgccttctgctccggttcatgctgcgcgactaaatggacttttaaagactttagcaaatgcggaaggtgctgtagccgaaagcatcaaagcacgacaactactaatcgacggcctggaaagattcctcgatgccaatcgagcagctcttgcagccgaagaatctcagttcgcagaactctcagatcgcaagatagaaatagataacaaaaaaagagaggttgaggaagctatcatgcgtggttttggcacaagcagtaacccacccacaccagccgggggtgattcacctgtcattcatcactctcatgtcacacctgcatcagagccagaccgcccagaagtcgagcccttgtcgcctccagtctttatgaagtcaatagattcatcggctccagaatttgaaggtaatgagaaattctctatcatggaagacgccggaagcagagccgaccagtctacagccgctagctcatcagaggttcatcctaatctttctactggcacctcatacggtcaactccctaccgtaggcattgtcaaaaagagaaaactaaatcacgaagactttccagatctaggcggtgatgcgatggatggtctcgacgatgatgttgcggccatgctgagacaagatacggcaaattgtgcttgaaaacaataatttgggtattatattgttagataaaccagcttagaaatagcttacgttgttaattaaaatggcgccattgattattttttcccagcatagcttttaagttgagttcagtcatttcgccaacgaaatggtcattagtttttttaattttaaagtaatatccgttatcgagactagcccgtggcagacactctatcttaggcttcatacttctttgttgaac

SEQ ID NO: 101 - DNA, 1648 bp, Golovinomyces orontii
  source 1..1648: mol_type = genomic DNA
tgagtgcgcaacaatgtggcgtctcccctaggatttagcgtttctcgcttaatccttgtcaatcatctgaagtccgtcgacccattcatgccaacagtgaggggtatttgaacgtatcattcacaatttacgtgttcgattctacgaactataccagaataattacctgtattaactgaaatggtagatcacatcataaaaaggaccctgattccaaggcttctccgggaatctttagcgacgaagatatttatgaagatgcggcgacctcgagttcaaccaagatccagcgtttcagcggtatatcttgcgcgcgttcccaaatacatatgggatgcttggcaaggtcttgatgatgactccgaaattcaggttggcactatccgacaatgttacaagaagggacctaaaggagaaccgaagaaaagatatcctcaacatcagaatgtccctaaagagtacaatctcgaagttaccgagaagcaggtcaagaacactttcatcttcacggaacaggatcttccaggattcaagtcaagaacacagactaaattcgatccaaaaagcgccaatatgccggccagattagttcagtcgaagagcgataagtttactccgaaaggagtgtttgacccgaacaaaagatttcagccgtattttaggaaagctgtcccaaaacgaacaacaatgagtggcagggttgcctatgaggttaactgtatagctgttcataacgaggaagcagaacgactattagccttgagaacgattgaagccatgaaacccaagagacatacaacattcctcaaccaagatatttcagtcactggaaagggctttattcagccgggctcaatcagtgctcaaaattcgttctctggtttcattaaaactaagggagtagcaactggtgcgcgcccacaacttcaaaagacagctcggatgccacaaaacgagcttctggacctacaattatggtctatgaaggcctttcgcgctgagctacaacaacccgaggcttaccttagagagaccctcgaaaaggtggcagtcctagccaagagcggaaagtttgctacactctggtctctaaaatcagagaacaaaattaatatgtacgaagatagtatagcacctacaatagaaggtgatctgggagtggaagatagtgaactggacgatgaaaatggggaggatgatgtcgatgtcaaatttgaggatgtagcataaatacgaataatacatccgactacggctgttatcattttggttctgttacgtcagggaagtgaacggctgataaagttaaggagttcaagaataagataaaaagataatatattggtcggcatgctcgttggtggtctacaataatcaaagaagaccaaacttaatcacaacctaatccagtcacgagtttttgatctggtcaatctcttctatacatcccgactcgaagtgggcgaggtagtagacagacttatggcaactggccagatttccattttccactacttcatgactcttggagcgtcaatacatgatttcttctaagaaataaatgtctacgtggaggccgtgttgcgaggaccattttgacgcatactccacaacctttcagtaccaaaattcttattattatttaaga

SEQ ID NO: 102 - DNA, 1104 bp, Golovinomyces orontii
  source 1..1104: mol_type = genomic DNA
atgcaaggcgaatgtagagttgccaagaatactcaaacgaaagatgtgagagatgagaacgatagaccctctaattcagaaaatacatcatcgcaggaaaaagagtccacaaaaacgaagacaatgatggaaaaagttcccatccatggaacacctgcacacaaagttgagtctcttcgttttcgatctacggcctttgcaggatctggcttacccaagaaagctgcgtttgctaagaaggaatttatgccagctacaactaaaagcacaaatgcctatgtcgtctattctaacgcctataccgcacgagaagcagttaagagacttaatggaactatggtgttagatcgacacttacgggttgatagcgttgcccatccatctaaatctgatcatcgacgctgtgtgttcgtaggtaatctcggatttgtcgatgatgaaagctcgttagacgaaaccagcggtatggtacgaaaacgatccaaaattcctgcagacgttgaagaaggattatggaggcaattcgggaaggcgggtacggtagagagtgtgagagtaatccgtgacgagaaaactagggttggaaaaggaattgcttatgttcaatttttagatcaaaactctgttgaagcagcattgttatttaatgggaaaaaatatccaccaatgcttccccgcatactacgagtagtccgtgcaaaagcaatcagtaaaactgctggggcacttgctgcttctcactccaaatcaaatcaagcaaaccatcctaaattgacttctgagcaattatcactccatggtcgtgcggcaaagcttcttggtattgctggtgccgcaaaactcaaaagagctgatagtgtcttcctgaatggccaggaaagcgatcacaaaaaaacaaatcataatccggttcctttatctgaagataagatactcagatcagccgaaagttttgtttttgagggttatagagctagtgcaaaatcctccggtaacagaaattcgaaaccaagcggaaaaactcgagcaaggtccgttaaaccgaaaacacggagttcgagacgagcctcggagtggaagaagaagagtggcaacaagaactaa

SEQ ID NO: 103 - DNA, 774 bp, Golovinomyces orontii
  source 1..774: mol_type = genomic DNA
atgtctaccacatttgcgccttcaagtacacctgcaccgaattcaacagtctatgtgcgcaatctcgaagaacgcatcaagcttcctcaattacgtgaagctcttgaagagctcttctcggaatatggaacaattatcgatattgttgccaaaaccaacttaaaagctaaaggccaagccttcatcgtttttgatagtatcgagagtgcgactaaggctatagaggaagtacagggttttgagctttttgacaaaccgatgcagttggcgtatgcccgcacaagaagcgatgcgtcagtacaacgagaaaaaggaagcggagaagaattcgaaagtcacaagcggagaagactcgctgaaaaaggtaagaagagagctgccgaagctgctgaggaacaaaagagacttaaaagagctggtgacgctaatggagtcgtacctgaatcaaacgcaagaccaattaagactacacggggttctggtcttaaatctaccaacgctactactgctgcagtaatccccgatgaatacctcccgccaaacaaaattctttttgttcaaaatcttccagatgagtacgacatcgatgctctaacggctatctttagccggttcgagaagttcaaagaagtacgtttggtacctggccgaagaggaattgccttcattgagtacgagactgaaacgggtgctattagcgccaaagaaaatactgccggtatggctttgggtgatggttctcagctcatgaaagtcacatatcaaaggcaatga

SEQ ID NO: 104 - DNA, 1956 bp, Golovinomyces orontii
  source 1..1956: mol_type = genomic DNA
atggtcagaccccagcaatacaagtttcctcctcctccgcttcctccagccccttcatcttcatatccgcatgcacagcaatatggataccctcaacagacgcctaattctccacagcatcaacagcgaggtggcggcataaatcgtggtggacgcggcagtaatcacaataaccgtagcgaaactcatagctccagctcacagaatatcactcatcacttaagtggcggctatgatcctcgacaaccacagcagccccagacttcatttcctccatctagatacaacagtaaccttaatagtgcaccaatgtctgccccatatattggccctcaaccaggtacacccacacaacaaggttattcaagtactcgttggcaaaacaatcagcatggtccaattcagccacagcagcctcacatgttctattcgtctcagcctactccgttatctgtccaaaattatcatccaaattatgcaccacaaacgtatcaacaacctcattatagcacatctcaacccccataccaggctcaaccaccatcttatggtcacagtgtacctccaaatcaaccaccccatattacaccccaaactgcgcctcaacaatggcaagggacacctcaacacatccggccgccctttactggccatcgcggccgtggcggctttagcaatagtggacgaggaactcacgaatcacctgctctacttatgggtcctccaatccgaatgggctttgataatgatcgtggagggggccatatggctcaagcgagcaatggcttcacacattcacacattagtcatcatcctcctgctactttccctcagcctccttttcacagctatccaccgcaggattttccccaagcaattcagcgactgccaagcgatacgaaccagtattcctctcctcaaaaatctagaggaggaagcacgaatttcaaaggaaaaggtcgtattgactctcatcaatcccattcacgtaatcgcacagaaaaccgccatcatcaaagtaacggaccaaaatcaacgaacgaaaattaccccaaggcatatggcacagattcaactagtaagaagaagaaaaaacgtaaaacaaataccctcgggctcacgccgaatggtgcagagcacgaagatagtgaggacgaagtcgatgatattgatgaagaagctcgtcttgttacattacttggagctgataccccacaattgcctacagatcttgaggtgtggctcgcagagcgaaaaagaaagtttcccacgaaatctcgtagagaggcagctatggagcaatcacgccttcggcgcgaggaggctcacgaaagcaagcacaaaaaaccgaacagcgagaaacctacaaagaaagaaggcgagacaaaacttgagaaacaacaaaggaaagctgaaaaactccgtctagaacttgaaaaagctgaacgcaaaatccaacaagaaatatttggctctaaacgcaagcgtgacaacggagatgagggtgatgacgatcgcggtcaagtgagcgataatgattcggagagctcgtctagcttagactctgatgataaacctgaaaccctttctacacgtgccaacaattcttcacggcttcatcctcccaaggctcaactccaacgtcattgcaagtatttttcaactggtggcacatgtggcaagaagggcaagtgtcgcttcctacacgatcatgaagttcgaaaccaggcactgagagacaaggaagcaaacggtggcaagatgactctaactcaacgtcttattcttaacgatacagctaaagatgacttaaccattctaaagtctattaagtatctcaaagagaaaggtttaatgccagaccaactcactggtagtacatcacaatatggtgacgaattacgagtcaaagactcagaaaatgacgatgaagatcatagccataacggtgattga

SEQ ID NO: 105 - DNA, 1783 bp, Golovinomyces orontii
  source 1..1783: mol_type = genomic DNA
acgagaaagagatgggagatgatagtatcgacaagtttgatttttattaagaaaagtgaagcgatcaaaagtggtgcttatttatttatttattaatatttattctccaatttagtcatggccgttcaaaggaaattcccttccccctaagatataagataagaagccagttaatttcaccgaatggagtgaatttattccgctgattcgcattttcatctaaaaaaaaagaacgtcaagaatagctgtggagaaggacaaagagtgtgggtacaagttttgtccatgtctttttggtagtccgaggggcagtcaggaacaataggtgcaacaagatcacaaaaattagacattgagagatctaaagagttcatccagcaattaactaataaacgatacaaattcgacaatggcagcgaatgaagatacggatatcaatgaagtaaatgatcaactggctcaagaggtcatggccataaatgctatttatggagagaagacgatacgacccatgaagaccacaaagacgtcatcatcaattttcacaatcgttcacggggagagtaaagaagaggaggaggaaggtcagaaatctatatatgtcattcatcttcctcgtcaagatatatggcttaaaatctactttcccgccacatatccagatccagatccaagtcttgagacgaaagatgggactgagaaaaaagtaatgcgcaagagaaattctggtaaacctttagttctaggaacttataaatgtggcggcgctattcgaaagggcgatgccgtccaaatttgcactaggtttgaggacattctcactcgcgtttatcgtccgggagaggtatgcctttttgatgttatggaagagatgagccttattgagactacaatttctactgatgcatcttctcctcctcctcctcctgaaaatttgagaccatcaacatctcttgagcgtgaagattcttcagagtgtaacactacttcgtctttgatgtcaatccagccacaacaaccattaccacaatggagtatatcagaacccattcgcgaactcaaatctgtctttatagcgcgaagtgctttgatcaaagccgtcactgatgtgtatcgatttcgagagtgtcttttgagtgaaaacaaaaaagtcgctgcggcaacacacaatattatggcatggagaattcgaatgccagccaagaaaaacggtacgagcaaatataatagtacttttattagtagtggcaacgatcgacgggaagaggattacgacgatgatggagaaagtgctgctggttcacgtttactacatcttatgcaacttatggatatctgggatgttcttgtcatcgtcagtcgttggtatggtggcactaatcttggtccacgtcgctttaccttaatcaactccgttgcacgggattcattactcaagctcactaattcttcgacttttttttctaataccactcacaccaaatcccatacgaattttccccttttttttcattttcaaaaacatcatgaatagagagaaagattgggattcgtcagtgtcacagaaaagaatctcatttgcaacaactagagtcgacaattctaaaatttaaacagtctttccttaatgtcatgttgctgccagaaaaaaaataaaagatcgaattgagagtaaattcacacatatcatagagagattactccaatgtaaaaatatgtatatatatattgatgacttacgagagatgttccgtctttcccggggaaaaaataaagatgttga

SEQ ID NO: 106 - DNA, 1493 bp, Golovinomyces orontii
  source 1..1493: mol_type = genomic DNA
ctgtatcacaatcttgcatcgtacacgttaatcctaatttcacaacccatttcactagatattaaattatccatcactcgctatgagcaacgaagatcatagtcaacttttgaataaaatcagcaaacttgcaggtcaaattaatcggcataaaaatgctaataccagtgaaggtcattctcattcaagcgcatcgtggcataatcctcgggtcgggcaaaattggggaggtggagtcgctaagtcaggtcaagtctatcctgcaccatctaccctaaactcgaaccgtcgaaaaaactctgcttctgaatgggtatctaagaccgatcgacatcgtcaattaatcaacgcaaatgtctttgaaaagacagtacaaaatcgagctagagcaatagaagaaacacggaaacacaagatgaagcagaggcatatacgtgaaaaatacctgcttatgaagcatctaaatcaacagggaaagaggtacaactatgggggctcaacttctcacattcaccacgacacgggtaaatatgaagttcacgtacagggcatacgatttcttgtatcgaggaatggcagcaagctcatgagagtttctgatcaaactaattctgcaaagtctgtacccagagtagctagtgtcggaccgaatgggaatatgtatcgtgctggtttaataaaggctctagttcagagaaatggctactgtcaaaaaattgacgagccgtgcaacatattttccactacgggctcctgccacaaaggcccacagtgtcgatatattcacgatccctctaaggttgcagtttgcaaagaatatctccagaaagggtcctgtttaaatggcgataactgcgatttaacaccatcgtgtgtgcatttcagccgtggtaactggacggcgtgcatggagcgccatgtcgttgaatgccctgacttcagcagtacaggtaattgtacgcggcgtgggtgcaagctacctcatcgagaaaaagcaagcctcatgcgaaataaggcgttagatagtaatagttcgaatttgaaagaaggatctagtgatgtttcaagcgacgatgaagaaatcgggagcgatgacgtcgattctgacgaactcgacgaattttttgacgacgaagcctcggatacagatatacctttgcagcaggactttgtccagttatcatgactaacaatagtattgactaacgtctttctattaaaatctaaataaagaattttcgtgatcagacagttagaaactgctctcattgctcgaaaattcgatgaaaataaatggaggaaagaaaaaaaggatgtgtaaaaaaaagaaagaaagaaagaaatttaaagataagtagcatagtctggtattagccgttgcttgaagagtacctaagtgtagatgatgtaaccttggtaagcatcaagcaaaatacatttatgttatggattgcatccggcccaaatcagtattccgttgtagtgatctctgg

SEQ ID NO: 107 - DNA, 735 bp, Golovinomyces orontii
  source 1..735: mol_type = genomic DNA
atgtcaagtcctaaattaaagagctttctgttcgattttttgcgtcaacattctctcatttctgagaccaagaaaaaggatctagaatttgatgtattaaccggtgcagaacgtgtgtttaacaactccattgatgtgtctctcaatctacacggagattactgtgctaaaaaatggctattgcacgaacttcgtcccaaagtcaaggatgaaaggactgtagattttatttttaccttaagcctcataaatttctcagtttggtcagattttccaaacgatgagcaatttacaatagattacaagggtaaaatttggacaggatattgcagtctcgtagccacattacaaagagctcgtaacgaagtcaatttgctggcatctaattttcctcgctttgatgatgtggttagttttgaagaaaaagaaaataatcgttttatgaagcctgcatttgatggtgaatattacggctgttttcatgacattaacgaaatagtcacttgtgcagactacagaattccccaagctttaaataaccttggattcatgtcgtacagctgcagtgtttggtgtatcgaactgattcgtcgggagatagcaaaaatctgtccagaaaccgagaacagctcaattatggtagacatttttgttcatgatatgtatacattttgggaagcaaacgatcgaccgttcatactgccctatcaccgagcgcgcagtttttggtattga

SEQ ID NO: 108 - DNA, 1275 bp, Golovinomyces orontii
  source 1..1275: mol_type = genomic DNA
atgatcaaaagaaagagatcatctttgaatcaaattccatcagattctttaaactcaggagatgatagtgacagcagtggagatgacattcaagcacagatactttcattggaaaatgaaatttttgaatccaggaagaactacaacaatttagttgttgctagcatatcgctgtgcagagttttcacaagatttatggtctccggtgtcatgataaagcgacaaaaagctactgagaaagaggctgtcgtagttaaatggcttagggaacaatgtttctggagcaactatcttaacttgtgcatgagacttctgaaaacagaaggacagtatctccagtccggacaagattatttattccccacatcatttttgacggagtttatacgtagcctactcaaaattatggaagaatatgatgacgtgcgattctacacttttgaagctatcgaaaatgataaagaaccaagtaaaaatttattccataactgtctgcaacttttggcctcggtcgaatcaatacccacgtccaatgaagagcttaacgatttctatatagttgagccacaaaagaaaacacatgccctttattctttatctcagcacaagaagcgcgctcaagctgcatggcttgctctgatgcgactagagatgaataagccacataggaaatcgatattgaagttaatggcaaattccattgttccttggttcgtaaagccggaaatattgatggactttctgacagacagctataacgctggtggatcgatatcactattggcattgtcaggggtattttatttgattcaagaaaaaaatctcgattatcccttattctacaataagctctactcacttcttgacgcagcattattacactctaaacatcgctttataaaaagactgtctagattaacacttaatgcccccctcaggtatcatcatggtaataccatggatctacaatctcttaaaaaaacatcctcaatgtacattatgattcatcgagaagttagaggcttggaagctaagaagataattatgaacgaagggacagatgacccttttgtggctgatgaggaggatccgataatacgaaagcaatcgacatctcactaccatccaaatcaattcactaaacatgtacgtgattattccctgctaaagaaagctccggttgttgaatttaagattccagcgaatatttttactggcctgaggagggtagtcgctgagaacaaattattgacagagatttggagtttttcttag

SEQ ID NO: 109 - DNA, 1594 bp, Golovinomyces orontii
  source 1..1594: mol_type = genomic DNA
cgctttcccacaccgccttgggcaataaaatatcgataggtggcgccttgcttgaagaaaaaaaaattataataaaaataggaattttgtctttagatgtatatatgacacccatggaaaatttctgatgaataccattgtacgttccaggaaaaaaaaacaatttaaaaaaagaaaatgtcttcttcaacgcaagacatggacgagagtcgaccttgtaaagttcgaaaattagacttatccgatgaatcacagaatgtcgaaaatacgccgagtcaagtgacgacgtcgagtattaggttggagaatctagttggaggagaaaaagatcaggaccataataaaaacgacgataatgaagaggtattatcggtaggaaaagaagacgagcctcaagtaaacaacaacaacaacatatccaagaaccaactgaagaaattaaaaaagcgtgagagatgggaagcgaatcgagaacttcgaaccaagaaaagacgtgagaaacataaagagaaacaattacgaaaagctttacaaagaaaagaattatccaccaaagattttgaaaaaaaagaagaatgtgatgatagggaatcaagccaatctacagatgaagaaggagaaaagaaaactatcccccacactaaaaaacatcgaagaccaactcaggtatcaatcgggttgattctagacactgcatttaatgatttaatgacggaaaaagagatcatctctttgggggcacaacttacaagatgttattctttgaacaaaaatgctcatttccgaactcatttagctgttagttcttggggtggaaccttgaaatctcgatttgaaaatgttcttgccaatactcatttacattggacaggagtcgtctttcttgaagacggggattttattgaggcgggaaaacttcttcacgataggatgacggaagcttccacgaagacatctccccagaatccctccgttgatgaagaatccaaggatgattgcaatgtggtattgccagcagatgaggaaccacatcagtcttcaacatcacacttgaactccgagtcgtccgttcatgagatgttgcctcccgtgaccgaaaatccatcccttgtttatctcacttccgattctcccaatacactcacacatctttcccccaatacctcatatataataggcggcatcgttgataaaaatcgtcataaaggaatctgttacaagagagcctgtgaacgtggcatacccacggcaaaacttccgattggagagttcatggagatgcaaagtagaactgtattaactgtaaaccatgtggtagaaatcatgttgaagtggcttgaaactaagaattggggcgacgcctttttgcaagtaatccccaaaagaaaacaagctgttttgaaggtcgaaaagaatgcgaagactcagttgggaaattgtgaagagaaaagtccgaatgctaatctccaaggagcagtaaaaacaaaaatagatgaagcagacaaacttgtccatgaatgatccctacctttatcgtcaaacgtaataataacttgctatacttctactagagagttgagaggcctagaaatct

SEQ ID NO: 110 - DNA, 705 bp, Golovinomyces orontii
  source 1..705: mol_type = genomic DNA
atggtgctcgaggctgtaatggtggttgtcgataacagtgaaagcagccgaaatggggactacacgcctacgcgttacgaagcccaatctgatgcagtatcactgatattttctgctataacacaagctaatccagaatcttctgttggcttgatgagtatgggaggtagaggaccagaggtactggtcacattaacgactgatcatgggaagattctagagggtctacatcgaacgaagaataatataaggggtgaaagccatttggccactggaattcagattgcaggtctagcacttaaacatcgacaaaacaaatcacaacgtccacgtatcatagtattcacctgtagcccgatatccgaagaagagagtaaacttatcagcttagctaagaaaatgaagaaaaacaatgtcgcgatcgatttcctcgcacatgctataatccctccgggacctggacttctaagcgacaagcttgtcaccagcccaatcctcaatggcgatataaattctcaaggaagtggaacgggagaacttgccacaggtagcgaaggatttgaatttggaatagatcccagtgttgaccccgagcttgcattggctttgagaatgagtatggaagaagaaaaagcaagagtcgaaaagacaaagaaagataaatcagacgccgatctattgaaaagcaaagttagaggagattaa

SEQ ID NO: 111 - DNA, 426 bp, Golovinomyces orontii
  source 1..426: mol_type = genomic DNA
atgtccatgggacatatgagtaatgatgatttcttcactaaactttcctccctattcgattcatgccgcaatgtggaccatgggagcatctacctgacccaaaagcgtctaacgtataatacggaagaagcattagaatcatccagctctcctccattcgacgatcttaagatttctaaaactttacctattcttatacgagcttcgaatggaaaatcaaaaaataaaaaagatcaaaaaataaagttatcgaccgttgtagaagctgatgggttagaagagttctttacaaggtacgcggaagtttgcaagtcaggcatgagcaatatgaaaaagagagatcgaagtaaagcgaaggagaagttaaaggcaagaaagaagcaaaatgctatatctgctccaactctagaatcaaagaaagtttga

SEQ ID NO: 112 - DNA, 3042 bp, Golovinomyces orontii
  source 1..3042: mol_type = genomic DNA
atgaaatctgtggttggattacctggagaagcagcacctctaaatgctgagctgctctcccaagcactattatcggccgtttcatcacaacagctcaatatacaatcaggaatcaagcagctccagatatgggagaagcaaagaggttacttctctcttctccaggatctgtacctagaaaaatctctaccgactgaagtacggtacctagctatcatacagttaaaaaatggcatcgataagtactggcgaagatccacgatcgctatcgtagcagaggaaaagactctgatacgatcacgcttactagaaggttgcatttccgaagacgagaaaaacctagctcttcaaaatgcattattggtttcgaaagtagtgcgaatagactatcccaatgaatggcctcaggttctaccgaatctaattagtatcttgcgggaatcgcggcactcaaaccaactacatttaaaacgaggtatattaatgctgttacagcttgtgaaagagctggcaagcgcaagattgagggcattccgagcaaagtctacaatgatcactgaagagctaattttcttcctaagcgaaatctacgtagaaaatgttacactatggacctcaaattcgatggaacaaacatccattatagcagaggcaatggagtgcagtctactaacaattaagactttaagacggcttataattattggctacgaatatccaaaccactctgttgacgctcaacgactctgggaatattcaaaaatccagtttggtctgcaattaaaaataatttcctctcaatcatcacatttagcgagcagctcaaaaattatgataaaagataatctcatacagctctcaaaattacacgtgacaatggcacaaaaacatcctgccgccttcgccctcctcccaaattccgtagagttagtaagggcatattggggactagtcaatgattatggagaaacttattgctctgagagacctgaattttgtgcgagatcttcgcaaagtgtggaaaacgtggatgataaattgttaaaggaaaagctctgtctgaaaggcttaattattttacgagcatgtgtcaaaatggtcttcaatcctaccaaatcttttacgtacaagacaaatgacatcaaagccgagcaaaaaaggcatacgctggtccaacagatagcaaatctaattgttaccaaattattcatccttcgccaaacagatctcgaagcttgggaagaggacccagaagaatggcaaattagagaagagtgtgctgatgccagtggatattgggacattgaaattcggtcatgttcagagaagctttttaccgatcttgccatcaattacaaacatattctcttgaatcctcttatctcgtactttaattctgcatcagatttaggatccggacaagaaaatattattccaaaagacgctatttatgcggctatggggttatcagctccaatactatccgaaacctttgattttaattcattcttggcgtcaacacttgtcaaagagactcagaaaactggaccgggcttcaaaatattgagacggcgaatagctattctgatcggacaatggattactgtaaatgtatccaacgagagtagagcaacggtttatcaaatatttcaacatcttcttaaggctgaagaagaaaccaatgaccgtgttgtacatatcactgcagctcgaagatttaaatgtgtcgtcgaagatcttagttttaattcagctgactttattccttatgctccgggtatattgggtagaataatggaattagcaggagaagtggaatctatcgaaatcaaaatagccattctggatacaatccgatgtatcatcaatcgtcttgaatcccatattcttcctttcgcagaccagatagtctctatgcttgcctcattatgggaagaggctggaaaagaatatgttctcaaacaatcgatatttgcgattctatctactatcgttacgtcacttcaggcagcatcagaccgttactaccctctaattatccctctcgttgctaattccatttctccagaatccgacactaaagtctatttattagaagatgctctagacctttggctcaatatcattgaaaccacttcatctactacttgtcccgatatcctatcactggctgatgccatatttcctttattcgagatcggctccgatgatcttcggaatgttctacaaatattggacacgtactgcattctcgcgccacaacatatgctctcagaaactcaccgtctccgtattctctcatacatgaactctctccttggtgtttctaagcgtgaacttgccggtcttgttacaacaatagtcgaaaatttaatccgtgcggccgagaaattcggagggtctcaaggcgtgaccttaataactcatgacttgcatagtagtggctacttaccgcaagtttttgctggcttacgggacgcatgggaggctcatcagacctacgggccgaatcaaacttatcctaaaattgacaatctcgttgaaacagactacttcactatccttgctaggctagcagcagctaatccatttattttcgctgacatgctttcatcctttggacaacttgatgaagtttggtcctggctttcgatggaatggttcagacattttgattgcatagcaaatgttgagcggcgaaaattgtcttgcatagcgctaacgcgtatgctagaactaatgcatcccacattaaatatggtattggctaatctccaggactacttttcaatctggacacagacaatcagtgaattgatttgcggtaacgaagacgtatcggattctttagtgtggaaatctaacgaggtaattgagggagcaaatttagacactataaggagacaagaatgggctatggacgatattgtacataaaatatcactttgggaatttgctgagaaaaaaatagcacatgtcatcgaagcctgtggcggtgaaacgaagttcatggaagagtggctaatcaacgtcgatgaatga

SEQ ID NO: 113 - DNA, 504 bp, Golovinomyces orontii
  source 1..504: mol_type = genomic DNA
atgcatatagattctactgatctctcactttcaattggaaacccgcgagatttagtggctaatgataaagatttgaagcagtctagatgggacccccccccaggaactgatcacaatagattgagagcctacgtgctacagcaccacagtccagctcctagtgagagtagaccacaggctcaggagctgggcctcaccacaaataataatgaaaagataagagctagtcacttgttagctgaaattacgcgctcgaaagatgaagctttgaaaataatgctcgcgcacgaagagcgtattcgatgtggcgtgaaaactctaggtgaactggcgatgaccgagtctgattgtactagtgccaagaaacaaggtgatcttggtttttttggcagaggggatatgcagaaagagtttgaagatgctgcttttatgctaagaccaggagaaataagtcagatcatagaatctgcatctggtctgcatttaatccagcggtatgaatag

SEQ ID NO: 114 - DNA, 1514 bp, Golovinomyces orontii
  source 1..1514: mol_type = genomic DNA
tttcctaccctcgactttctttcattttgacaaatttaccaagtcaacgacgttatttattccgatttccctccaaggctgggcgagagaagacgagataaagagttgggatagttgagcaagagaaaaaagcttacagtgccttatgatccttgggtaggaggagttcggattgcccaaaatttcaaccaaggctaaggagatgatggagacaaccacaaagatagcatctagctccctggatcccctaacgagtagcattcgcagtggtatgatcgctatcggtctttgcgggagtgtttctctcttttccgcaatcagctctcttctattcttcacgtatcgcatgatatactggcgagatctctcttctcaagccccggctcggagacaggtattcgtgctgatttacaatcttttcattgccgatataatacaggcattaagcttcgttatctcattctggtggatctcaaagaacaagttagtgggtccgagtctggtctgtaatactcagggtgtgttgatacaaattggagatgttgcgtcggcaaaaaaccgtttcctatcgcaacttgtcaccttgcttgttattctctggacctttatcatgattctggccactgtgggacctattcgagcaaaagagaatttctttgcaccggcaggagcatggtgttggatgagtgaagaatatcatgcggaacgcctatatctgcactacatctggattttcatgtcgcaacttggctccctcgctttgtatacttctatcttctgctatcttcactttctcattaatacgagcgtgcctcgaccaattggacctcacctggcaaggcctcatcctagcaatgctaaagcttgttccgctaatcgcactattgtcatgagatgttcttgtcacatggtcatgtacatatttgcgtatttagccctcacactccctttagcagctggccgcgctatggctatggcaaataaagagccatctatcgaattttttattacggctggtacattgatagcctgcagtggatttgtcgatgttgtgttatatgttgggactagaaatcttctggtcacgaactgcgtcgcccgagagagtttagatctgggcaacggcaatggaatgcagccacttgtagagggcagtgaaaagagatgtgttagtaatagaagtagtggaatgacgtcggttgaggctaatgaccacaaatatgaaagctgcgaaagtatgcttctcccggtcaacacagaggccgtgtctatcacgccccgtaactctcatgaggtcaatttcgataggatgagctggttgatatgagtttaaaaaaaagattccgagattttacattcttgcgcattatttcctaaaacccgaggcagacctgctcagcctctaaaaaattttgatcttgattttgaattatttattaacgtatcaggctaatgccttacaaccaagagacgtgatacgcatatgtgatccctaaagactcactattacccaa

SEQ ID NO: 115 - DNA, 1921 bp, Golovinomyces orontii
  source 1..1921: mol_type = genomic DNA
gagcatgagggttgacacaaataaagaacacatcattattgaatcatttaggacactcaccagttgtttttactcttcctcattttttgccgtgcctgtcttaagattttctcttgatggtccgtaaagaagaaataaaccagctctgaacaatttcagggctaggagccatcatgccgagctgtctttatggtatttttttagcattgtgttcaattacaggcgcaattaatgtcaaattggatcaatcaaatgagaacaggcaaatatgtgccggggtttacagtcgagcagcctggggaggtgcagtcgatcctcacatctcgatcagctttaccaagaacgataccgtcaaagaaccagatccaatcgtcagtttaatgatatttgaatggaatgactacgacttaatagggcttcaacccactcctgaatctgagaataaagagtatatttgcgatgaggaaacaattggtttgaaatattgtaatatcaatgaaaccgggcagttcatcttggctccaaatgcaacaaagctatcgaagaatttacttttcacagaagccattcacataaaagaccctgggccaccaaggaattacagtattaaaaagacaggttatttttgtgttggcacaagtccataccgtcccacagatttatcttttgaggctagtgtagagttccgaaatgcgtatggacaactcccaggatctcagattccgaaattaccattttatggaggtatcactattgcttatgcagttgtcggagccttttgggcctttctctatgtacaacaccgtcatgacattcttcctgtacagaattacattacagtaatacttatattccttgtagtggaaatgttaatgacctggggcttttatgattttatgaatcgaaacggatcaagtataggttcaaagattttaatgatgattgtagcagtacttaatgctggtcgcaactctttctcattctttctcctactaatcgtctgcatgggctatggtgttgtgaaagatagcttgggcaaaaccatgatctacgtccgctggttagcgggggcgcactttctgtttagtcttatgtatgcggtaataagcttgacaataacccctgaaagtgcagggtctgttgtattattggtcatcttacctcttgctgggactttaacggctttctacgtctggactcttaattcactcaaccatacgatgaaggatctttcagaccggaaacaaacggtcaaagccttgatgttccggagactttggtgggccattttaggatctattatggtcatttttggattttttttctttaactcctttagttttgcttcgagaggagatcctaattttgtcccatttcactggaaaacacgatggttcattctcgatggctggcttaatctagtgtatcttgcagatgttattttcattgcctatctctggcggccgacagagaacaacagacggtttgcaatgagtgacgagttggcccaggatgacgaaggatttgagatagaagattttggagcggaggatgacgatgacctagaaagcccaaacggtcacaaacaaaatgattcaagatatgatccagtgccgaatatttcctccaggaagcatggtaaccatgtagatcgtggaagcctcgaaggggaaacaatgtttgccattggcgaagatggggacaagtggtcggatgatgatactaacgatgaacataatggccttgtcgacaagtcaggcaaggctgtgaaatagatataaaagcgtagtgcataaatttgattctagatatcttgtgtaactttattatttaaatttaattgttaatagtggataacacatctgatgtaattgaaatagtagctcaagctggaatcacatcaaaaaagtaaatgaaaact

SEQ ID NO: 116 - DNA, 1092 bp, Golovinomyces orontii
  source 1..1092: mol_type = genomic DNA
atgtcatctcgtgcgccaaatcccgcctcgggatcgcgcaagatctccttcaacgtgagtgagcagtacgatattcaagatgttgtaggggagggggcttatggtgttgttggtaactctgctctccacaaaccttccggacaaaaagtcgcaataaagaagataaccccattcgatcattccatgttttgcttgagaactctgcgagagatgaaactgttgagatattttaaccacgaaaacattatttcgattcttgatattcagaagcctcggagctatcagacctttacagaagtttacctgattcaggagctcatggagacggacatgcaccgagtaattcgtacccaagatctctctgatgatcattgtcaatacttcatttatcaaactctccgcgcactcaaagcaatgcattcagcgaatgtattacatcgcgatcttaagccatcgaatctccttctgaatgcaaactgtgatctgaaggtttgcgactttggtttagcacggtcagctgcttcacaagaagataactcaggctttatgacagaatatgtcgcgacacgctggtaccgtgcgccagagattatgttaacgtttaaggagtataccaaagcaatagatgtgtggtcagtaggatgtatactggcagagatgctaagtggcaagcctctgtttccgggaaaggattatctcctaactcttcttcatagaccatcatcaacttaccctcattctgacgttctcggtactcctacaatggaagattactacggaattaagtcaagacgagctcgagaatacattcgctcacttccatttaagaagaagatacctttcaaacaaatgttccccaagacatctgatttggcgttagatcttctagaaaaattattagcatttaaccctgtcaaacgaataactgtcgatgaggcattacaacatccatacttggaaccctaccacgaccctgaagacgagccaatagccccgccaattccagaagagttcttcaattttgataagaacaaggataatttgagtaaggaacagttaaaagaactgatatatcaagaaattatgcgatag

SEQ ID NO: 117 - DNA, 709 bp, Golovinomyces orontii
  source 1..709: mol_type = genomic DNA
atttctttaaatctcacataccttaccttcattttaaattttttactttttcatcttttaattaattgatcgagttcttctgggaatattgtgttacgctgtacagagttcattaagaaaccggaaaagagttgtaattaataatgggaatctgcttctcatgcttaactggtgatccggatagagacttccccgacgatgacgaccaatcgcgattattatttgaagattctctcgacgctcaatacggtactttcaggggccatgatcccaggagtatttatgccgaccctgtggaagctcagcgagcaaacgaagctctaacgaaagttgtaacgaaaacgtcagaccacttggtagatatatttgcagtcattccccaaaacaccgcttcgtcatctgctgcttcgttcccttatcaggaaagctgtccgcaacattacgaagatatcattgcaaaaatatcttttgatgatcgtggcgaggctcccatcgagaactcatctctcaatcaccttcctcttttcgatgtatggactacagacaaagaaatccatcaaaaatctaaaaaccgtcactcaatcaaatctgacggagttggtccgtttttaggggaattcgaagatccaactttggcaacagaagaaaggtctagctaacgtctatgaattttttaaacttaccggcgtcgaggcgaatgtgagatgca

SEQ ID NO: 118 - DNA, 1984 bp, Golovinomyces orontii
  source 1..1984: mol_type = genomic DNA
ttacattaaaaggcttaattctggggaaagggtggtttatcggcagcttaatcgtaacgtcaggcttcgactggatagcctgcataactctaaaaatagttatcaatagttattattgccccaaatggcaaacgataaataagtctcgggatcactgtatcaagccttagataatagatcatttggccaattgttgaaggattctatagctgaaaccattgagtggaatagatcctaccgatctaagttgactactctctgcaatggtccactgacatcatggaatgctgtcacattcaacaatcaaactctaacttaggaacgtgttcccttctcttgtgaatagctatcacatcgcccgctttagttatcttccatcgttatccgtattcagttaaaaaaaaccggacgcacactgaatcagagacggtgaagagatagggagcactttcatcaatcgccttgattagcccgaaagatacatttgacagacatcatgagttcgcatagtcttgtatcaaatctaaaacacaaattccatatccaacccgaaagttacaccaagaaatccaaatactattttggacgtacccttggtgctggtacatatggaattgttcgagaggctgatggtccaacggggaaggtggctgtaaagattatactgaaaaaaaatgtcaagggaaatgaaaaaatggtttatgatgagttggaaatgttgcagcacatgaagcacccacatattgtgagatttgtcgactggttcgagtctcgagacaagtactatatagtaacacaacttgctacgggaggagaactttttgatcggatttgtgagcaaggaaagttcacagaaaaagatgcctcacagacaattcgtcaagttcttgaagctgttgattatctccacgacaataatgttgtacatagagatctaaagccagagaacctactatatctatgcaattcaccagactcagatcttgttttggctgattttgggatcgctaagatgcttgactctaacaatcagcttcttactaccatggctggttcttttggctatactgcgccagaggttatgttaaagcaaggccatggaaagcctgtagatatgtggtccttgggtgttattacctacacactactttgtggatactcgccttttcggagcgagaacctcttagaactcattgacgagtgtagcaatggtaggttaattttccatcagcggtattggagggatgtcagcgaagatgcaaaggatttcatcagacgcctattgcagcctgatgcagatgatagaccaaccagtaaggaagctttagcacattcttggatcgctggagaaaatgcaaccgatcacaacattctacctgaacttaaagcatttacggctaaatcacgacttcgtagaggaattgaaatcgtcaagcttaccaaccacattgaagctttgaaactacagattgacgagaaagacgatcaggacgttccacacaatgctaaatctgctgcctttgaagctataactggtggagatgacgtctctctgtctaaattaacctcactaaccgaaagaaaaaaccacactcctgccgccaaagcggccatctttagagagattgtacttgcaaaagtcagagagatgaaggaggtcgagaaaagaatacaggtggaaaaagatgcacaggagaatgcggcgagaaggaagagtatgcaggaaagtaatcaagttgaatagatctttgacgaaagagtgtgagatttttttcccggcaacttttaactcaaacctggaaattaaaaatttgaaatgccttaattcggacgaggtttacacaaatcatgagatttttgagacagaaatcttgatacttgcttggatcaagttctctatcctagatagaggctttcaatacagcatgagttccgactaatttacatgtgaaataattacccgcacaataagcttcaacaggag

SEQ ID NO: 119 - DNA, 2089 bp, Golovinomyces orontii
  source 1..2089: mol_type = genomic DNA
cagctagagctatgaagaacgttttaccttttctccatgacggagaacttggacctgttgcatttctgagctgctaccaacaacagtttacagcgcaatcgtgtgaggaaacaaataaataatcttgtaatactgcgggctaaatttatccgagacattccgatttaccctgggaaagatgtttttatcgggagagatgtctaccagtgtgagtttcatatagacaatgatcaagtctcaaaacttcattttcggatgtactctgttatctatgagaaagacaagaaatgcaacatgcaacctctggtatactgcgaagacctggagtccaccaatggaactttcgtcaataataactgtattggaaggattggtcatgaaagaatcggtcatcttcttaatgacggtgacctaattgagattcgaccacattggcattttgtatttaaccaaccagctcatcgattgatgagctttaataagaagaatctggcagacttaaagttttttaaagatgagttttctgtctccgagcgtcttcttggcaagggtcattttggagcagtatttcttgctcaagacgtagttacatctcggcaactagcatgcaaaatagtagacttgagtgaagctgcgtatgagatcacagaaactatccaatctgatccattgggtcagagatggacaaataagtttcacaaagatagagacggaaaaagactcgttatgcgtgagatcaggatcttatctaagctgagccatccacacatcattaatcttcaaaaggcattttgctctgatacacacctttacatattcactgagcttgctcctgctggagacttattttcatacatagagtctcatggtggttatctaactgatttacacagtcgtgtagtctctcgacaattggtccttgctattaagtatatacactcccaaggaattgtacatcgagatattaaacctgaaaacgtacttattatgcaaaatgactttgggggtcgtgttgtattgacagattttggcttcgcaagctatatcaacaaagaaactggcaggttgtcatcacgacttgggactggggggtttatagcaccagaaatagaatttccagatttaactgatgggggatacacgatgtcagtagatctatggtcactaggaatattaacagtgtgtctgctcactggaagtattcttatcccaaaaaatgatttattacaattaaaccaaaatcagatacaagctttgttcctcaatatgaatgagaatcaaatagggaacagatggcagtcgatgagttcaaatgctcttctgtttattcgtagacttttggtcgtaaacccggcaagaagaatgtcagcctccgaggcgctcaatcatccttggtacactatgcctgcaacagaggctttaatgattaagactggatatcagagagttattcgattctggaaaaaaagaaacagtaatgatgtgctcaaaagaatccccaccaaaaataagaatacatctatggagttaggttcgctttctgaatccaaatctgtgataaaacttcctgacactacattatcgccatattttaatcttgaccgacatctagaaagaaaaaggggtcaaagaccgaaaaatatacttagagatctgaagggatccttctttattacctcagaagcatatcaacaagtgtctccaatgcgaacagtgagctcgaaaataaagaagtaatcaaaaattaccgtctgcttagaaaaaagcacacggatataagaataattctgattaagaatcagaattaatactgtataagactttaataactttaatatgaatgactattacaaattggattcggattcactttatcttgtgggctgtaattcaaaaatttatgcactctatgcaacggaatctagaatatgtagggctgttatttctctagaaaaagctttagattttaagctaaacatgcgaaatatacactcaacagttggcaatgaatatttttagaattagcaataatctagcaaatattttaacgtatatcgttaagcttacttattactgacatccaaagtaa

SEQ ID NO: 120 - DNA, 669 bp, Golovinomyces orontii
  source 1..669: mol_type = genomic DNA
atgggctacgaagactcagtttatctcgccaagcttgcagagcaagctgaacgatatgaagatggtagaaatatgaaacaagtcgcttcagaagaccaagaactatctaatgtaattggcgctcgccgtgcttcgtggaggatcgaatccaaaggaaataattcccaaattgaagcagaacttgcaaagatttgcgaagatattcttgaagtcctcgacaaacacttgatcccttctgctaaaagcggagaatccagagttttttaccacaaaatgaaagccgatatgtctctcatagcatacaaaaatgctactgaagttgctgtgactgatctcgcgccgacccatcctattcgacttggtctcgcgttaaacttttccgttttctactatgaaattatgaattctcctgatcaggcttgccatcttgctaagcaagcctttgatgatgcgattgccgaacttgacacacttagcgaggagagctacaaagactccactcttattatgcaactcctgagagataatctaacattgtggacttcctctgaagccgaatcgagtgccgctgatcaaggctccgctggcgtgacctccaccgccgccgcagagccaaagaaaagcagtgtagcaccaacagagtcgacaaccgacgctactgctgaatag

SEQ ID NO: 121 - DNA, 843 bp, Golovinomyces orontii
  source 1..843: mol_type = genomic DNA
atggctgtctcggttgttgataaaaagtatttaggacggtttgctagtaaattccaagttgaacatccacttctagctaggagtctctttcagatccttgggatttttacattattgtcacagaaacttaaaattgcatgtcgtctacggagggtcgacacaactcagaatccagcttcattagatctatttacacggatcacttggtacgctcgagaaggattgaaaatactggaagaatatataattcctatggttgccaactttggagaagtgaaagttttagcttataaactgagagcaagtttttatcatgcctatgttctttatcaaaacaatccaatcatatgtctgaaaactggtcaaaagatgaggttgcgagctctgaaaaattcttcaacgttatcgactgaaatgggcaaaagtgtacaagatcggcccaatgacaaattgtcacctctggattctcttctgcctaaactttcacttgaggagagagatcataagacagactctgaaactaaatgtccgtcagcaactgatgtcaggtcgattagtttaattccggctgtggactaccggcctattgctgatcactgctttcaagaagctgttgttcttgcaaaaactcacctttacggaagtcatcctttacgcctctctctaatggttgagtacgtttcctatctgtacgattgtttacatgaatgtgaaaattcacgaaaattagctaaaaaatcaatatccgaggtctacaaagatcaagaggggatcgacaacgagatgttccatgatactttatatttcatcggaatactaggaattcttatgaatagaaaatga

SEQ ID NO: 122 - DNA, 1359 bp, Golovinomyces orontii
  source 1..1359: mol_type = genomic DNA
atgaaagccaaacacctaattctgaccatagcgcttgcggctactgcgagggcagaagatcaatatgatgcttctgaactaccacagttgaaacatcagcagttaagaataccttttccgacagctattgctgaatcgaagtgcagctgtgccactgaatatataacatctacaggcgagggttttctttatactgctgatgtatcatcaattaccaaaaattttgatccgcaaccgactcacgagtatcctctaatcgttgaaccatccatatccgttaattgtccgcccccgtccaccattactgtaaccgagacaaaatatattactttgatgcctgatctagcaccatctgatcctgctagtccgatcttagaaccgcaaaataccgatgccggaccaaactctccattaaatccctctagcccgatattagatcacccaaatactgatactgggccgccttctccacctgctccagtcgtttctaacattgagatatctccgtcagccccagaccccagccctgaagtatcttcaaaaccacatactggcacactgggatctaacaatggtctgtgggcaatcactttttctccatttaatgatgatggaacgtgcaaaggtgagactgctgtttgggaagatgtgcgcttgattcgtagcgctggcttcaaggcaattcgtgtctatggtactgaatgttcgggaattgaacacgtcagttctgccgccagttttcacggactaaaacttattatcggtatatttatcagcgaatctggttgttctggtgctgcggagcaagtaactcatatcacaaaatgggccaaatgggaaattgtcgagctaattgtgattggaaacgaagccctatttaatggccatacttctccagatgagctcgcaagatttattagctcaaccagaaatacactacgatcctctggttacaatggaccttgcacaacagctgagcctctcaatatctggcagcaaagctcggatgtattgtgtggtgcagttgatatcgttggatgtaacattcatccatttttcaatccagaagttgacgctagtcatgccggacctttcgtcaagagtcagctcgaaattgttaataacatttgtccaagcaaatatggtatcaacctcgaatgtggatggccttcggctggcgagtgcaacggcaaggcttgtcctggtgagtcggagcaaaaaattgctgtggaaagcattcagtcatttgctggcaacgtgtcggtaatgtttacatacaccaacgataaatggaaagacccaggccccctcaagattgagcagagtttcggattaattaagctcctgaatagccactag

SEQ ID NO: 123 - DNA, 654 bp, Golovinomyces orontii
  source 1..654: mol_type = genomic DNA
atgttgtgcttcatttccatcttcacaacagctctcctaatctctccctccctaggagttaattcagctcagaacggcgaaactcccgatgacgattcattaggttctacgaaacacatgaactttggctctggtctctctgaattcaatgctcatgaagatatgtatgttcctgccatggatctgaatgggtttagaataaagcgacgacattttcaaaatgaaggctattactgcagcaaatcgcgcaatcacctcgaatttacaaatcaatctttcgtgaagaatgaagctaagaaggcatgcaagggtcttgaaaggtcaaaacacgaacacaaacacgaacatgaacatgagcacgaagataaacatgaatataaagaatatgaagaagaagaagaagaagaagaagaagaagaagaagaagaaaataaaataaaaaaaggaaagaaaggaaagaaacattccgattaccctcatccatacaatgcagtcaaatatgtaaaatattccccaccatacttcgaacaccgaatccatgatgtgaagaaaaataaatcaggtctgagcgtcatcatagatatcgactgtcatattgttgatgttgttgctctcaaccaagataaacgataccatcaatgtgcccgtgcatga

SEQ ID NO: 124 - DNA, 531 bp, Golovinomyces orontii
  source 1..531: mol_type = genomic DNA
atgttcctcagagcttcgttgaccttctgggctctcttggccacagagataagtctgtccacgacagcctccgttagacgactggagaatcgcgaggttgttgacgatattaatgacaatggaatcatgattgagtgggcaagatgcaaaggtagacactacgataaagatgaaatatatgaaacgctcaaacaagcttgtgagacgaaaaattcatctaccatttttgaaaaagccgtcaatcttcgtccacatatcccatcgtcatcagagaagtatcatcatgagatcaaccctccctactacgcgtactctctgcatgataccgtattcaaagataaactacatccaatcgatgttatcgtgatgaacgatgaatgtaagctggctggtgtactcatggagaccaccaagatcagctgcaacgacgacacgtgcggctccgaaccccggtacaaagattgtgagatccgattaacgaaaaccgctccgacgtcgacagagacgactcaggttgcggaattgtcttga

SEQ ID NO: 125 - DNA, 489 bp, Golovinomyces orontii
  source 1..489: mol_type = genomic DNA
atgcgtgcatttcaatttacgttaattttcttcacaacattcctaggtcatctaacaaccaccgcgcagaaaacacgacattttgatgcgttcggaacggcatatgagggcgtcgtttgtaatggtcataaattcttgaatcctgaaatttatatgcaagcacagttcgcctgcaaggacggaagagtgaatcccaagataactggtgatggaaacgttttgaggtttgttgataaatttggaaattttgttagagacacggtgcgtctttctaaccgggagggtgatctgtatgttgcccctctctttagaaacgatgtcgaaaggaaccaagacgggttgcttactaaaataatggatgtggggcccgaccgtcttattctatctgagaactgcgatattgtcgctgccatctccatcgagcatcaccgggtcccagacgagagttttacgtctataaaatttcataattgtaaaattcatcgataa

SEQ ID NO: 126 - DNA, 633 bp, Golovinomyces orontii
  source 1..633: mol_type = genomic DNA
atggctataaaaatctcaaaatctctcgtttttctgaaatcatcttccatcaattctttcgttcacaaatttttcaaaaaaacaaactatctgtcttttcagaccatgatttcgttctcaatgaatctaatttcattccttattttctccggattattttttggtgcatatgcttggctaaataagactcaatctgttgtctgggtcacaataactactgatatttacacaacaatttgtccgtctaataccgaattctccgatgggtacatgaaatctactgcttctttaccgaatctttccatgtctacagattttccctgtaccctagcccagacagcttgttcgccagacacatccattagagcttctagccaaacgattgtggacgttaaccctctcccatcattcaatccaaaatctcttacccgagcttgggtcactgtcactgagacagttagcgagcttacaactttctactcaagctcgacggagtttgtacataacttaaaaacgtatacagtcactaagcctacaactttgaccataagcgattgcccttgcacgatatctaagattattccagctactattcagactacaataacctctgttcttacaactgtatggtaa

SEQ ID NO: 127 - DNA, 318 bp, Golovinomyces orontii
  source 1..318: mol_type = genomic DNA
atgcaattcaacatcttcgccatcttcgccctcttcgtctctttcgcgattgcaacagagaccgtaaccgtaactgtctgtgcaccatctgcctctgcccatccctcttcgggatatgctatgccatcagtctatccggcaccagtttcatcagaccctgccagtcctgcatacccgccaagcgcttctggtggctactcctctccaccaccaaaccaaactccagcaccattcaccggcgccgcttcagcaaacgcagctcaggtagtatcagccattattgctgccggggtcgtagctatggtaagactggtgtga

SEQ ID NO: 128 - DNA, 495 bp, Golovinomyces orontii
  source 1..495: mol_type = genomic DNA
atgacaaccgtgagtactgctcgaattttcacgcttgtattactatgcatttcttctctctatcagagcgtcgcatatccgttaaatttcgataaagtaagagccctctcaaaagacattcttggtagtgctcgtaaaaccctctctaaaagacctttgcagatcctaaacacacactctatcctcaaagctcgctcacttggaacagagcagcttcaacgaagagcattcactcccgtaatgggagaagtggccacaacagtatttgggaatgctatcggaggagctctaggtcctatctttgaagaaattggcacttcacttagtagcggcatgtcggggcaatcacatgagtcagacggtcacggacatgaagaggaagtcatcgaataccaaaccttgcacgggccttacgaaagaaaaaatccatatgcaaccagccggagtaaatcgaaacaaaacacagaagaatcacaggaggtaccggtatattga

SEQ ID NO: 129 - DNA, 366 bp, Golovinomyces orontii
  source 1..366: mol_type = genomic DNA
atgcgtttcagctccgtgatgatacgagtatttacgtcaatgcttcttttcgtaatgctcgcaaatgtagtcgagtctatgaagtcggaatgcccctttcaaggtagagagtgttatcaaagaaatgtgaatcataataaggaggaaaaacactttaaaactaagtgtttgaactgcgggtacagagacaacacaaaaaagtatacgaatgatgataacaaacgcattaattgcaggaactgcagagagaaaacggagcacgaaatacaatacaacggagtaacatatcattataattgtcctaaatgtaatggagaatggaagataggttccatcctgcaagctcgagactggccgattagttaa

SEQ ID NO: 130 - DNA, 552 bp, Golovinomyces orontii
  source 1..552: mol_type = genomic DNA
atgcgatcctctctcgcggcacttttttcctcctttctcctctcatcaactctcgtgcactctcacaccatcgataacagcgtcttttcagcacaggatactaaaagtgtctctatctatgttcagatcaaaactgccattaagaacccagagaatagaagtagatgcgaggaagaggacgactcctgccaggatagagatagttccgaaaattcggaattttggactgggggctcatgccaagccggacaatcctcttgttctgatgcgtcaacgtatagatatggcttccgatgcaataaaaaattctttactcaggaaaaggtaatgagtgctgcaaaagctgcgtgccctcacatcggtcgtaattcgcagagacgtgtcttcccagcaccatacactgaatccacattctggaagcacggtccatacgtggagtggccaatcaggcgtaacggatgggcttggaatacattaagccgcatcgttggtgctgtaatccgtggcaaaggtggggaaagatatactcagtgtcaagttgaacggcattaa

SEQ ID NO: 131 - DNA, 375 bp, Golovinomyces orontii
  source 1..375: mol_type = genomic DNA
atgcgtcttcacatcttcacactccttttgccattggcggttttcggttatgatcaggaacccatcacctcaacaaaaactacgacttcaacggtcactcagaccgtaactgtacatattacaccatcagcgtcacccccattacaattcaacagcactatgcccattgataagttccatgtgactgcatctgcgtctatgccagccccttctcaaatttacgtcaacaagaataacacgaatatggttgatagcaccattccggcccctaaagaatctactccgattatgcgtgggaatgctgccaaatatctgatcagcaagaaatctcttctcgcagctgcaggtattatcacagtggtcacaacctggtga

SEQ ID NO: 132 - DNA, 561 bp, Golovinomyces orontii
  source 1..561: mol_type = genomic DNA
atgccttcaccatcctgcatacaatcatccgcgagaaatgtggttacgggtctgctggattcgaaccagccatctcctgtctcaagtggggtaggtgcccaggctacccagactctacttgggagatcgacccagatggcataccactataccatccgaccctatttatcacgttatgtcgttgtgttattaccaaaattgttcaaggtaatgatttattgcactattttgttgggctgctgtactttttttctgcaaaagatctgtccacataacttcatatttattagcccctgtatgggccatagatggagcaaagaaccaaatccccgaaaggatagttatactcctccgaagcaccctaagacaatgcttacagaaagtcaaagaagcatacaagtcgaccagcacacgggtggtcgaacacgaaatctccatcctcccgatggagatttatctcaaatttctaagagtgcagcgtgcggggctcaccggaagtttagcggtcagaagaaaaatagaaaaggcttgcacgacaataaggcaccaaaacggaaatga

SEQ ID NO: 133 - DNA, 1725 bp, Golovinomyces orontii
  source 1..1725: mol_type = genomic DNA
atgacggcagaaatcgaaaagcctaatgagaagaagccatccttggcgaaagtatctgcaaaatctactgcagatccgattcttcgcaacgcccttcgttatactatttcatccaaggaatatgaggcgcttcacaagtatgttctatcacgaagtagaaccgttagaaggagagtgcctcctgtgaacgtattcgagcagttagttggcacgacgaggtctgagggaggtaaagatagattatatggccaagctacaggtgaaaaagaggtatcatggcttgtgtatcgagatgattacaatgcagctatgatcagggagagtctgcgggtattcattggggccactttgggtttaaaaatatggagcatcttccgtcgaataatagcaccggcagataagacccggacatcgaccaaaacgagcctttggagattctcaaatctccgccagtctctctctctgggtttaattctcttactacatcgtctactttttcgctttttcgttcgattaagagcccatcttctggcgccagctgcagccccttttcgaaaacgtaatatcaacacgttcaaagcacttacctctcgttatgctccagctataggtgcgagctttgctggcctcgctttaggaatatatcccgcagtattatctcgagtgacgattgctctctatgtgttaagtcgaggggtagagtttgcatacaaccttgctgaggaggaaggttggatctggaagaatggaaagcctgcttggtggggcacctggttatcgtttcccatggcttctggtcaactattactcgcctttgtctatgaccgagactgtttccccaaagcatatggagagtttattcttaagaattctcaaccctacatccaaaatcgccccgatgactatccaaactacctgccatggccttccaagtatgaaatcgtcgatagtctgggtaccatgggcaagcaaaactatccgaatctcatatctcctattctctttccaaagataaagccaaacattccgtcaatcgccccaatcaccaacaccgctcacccattaattactcacctttcatgcgcaacccttcatccatctgacccaagttgtctacggacttatctgaattactggattactgtcctcccaaaactggcccgcttcttcacaattatattttctgtactatccctcccgcgcctcctaatcaacataaacgatcccgactctctcataaatgcaccccaggtatttattggtcgacttataaatcgcgttattcgttattctattttcgtctctggagccattggtacatcctgggcatctgtctgtctctttcaatctcttctctcacgcaaaagtctttcagaaaagcgtttttttcttggcggctttctcggtggcctctgggcctggattgtccgccggcaggctcaaagtgaatttagctattcgatgcgcgccagtattttgagtttctggcagatgggccagaaaagaaaatggtggagaggttatcctggcggtgaagtattcatctttacactcggcctggcgattttgaacgttgtatatgagctcgataagggtagaggtgtcgttgatagttcggtaatgcgaagcatactgaatgggggacgcggttatggctggaaaagtagtgcacctgtactaacagacgagtcaaaagatgacaatagtcaatctagtcgtcattaa

SEQ ID NO: 134 - DNA, 1164 bp, Golovinomyces orontii
  source 1..1164: mol_type = genomic DNA
atgactcttctcgtgttaattctcacttcatttttcaccatgatctctgcggtaaatctcattgtatcatcgtacgcgggccaaatcacgtctctatctcttcgtcaaacggaggatggtgaacataccctgacaaaactatcggtaattaacagtacgacacctcaaccttcgtggctcgagaaatcgggcgaaacgatcttccttgcaaacgaaaactttattggtccaaacggctccttacttcctttcaaagtaaatgagacaggagagcttagcactattcagcaatatgtgaatactcctgccggacctgtttctatagttgcgttcaatcaagggagagctctggccgttgcccattatgcatctgccgtctctagctatgggctaagtagcgacggttcactgaagcctcttcaaacctttttctttcagggtcctctaggcccttttcctcagcaaggaagttcacatccacaccaagtcattcttgacccttccgaaaaatttatcgctgttcctgatcttggatctgatcttattcgagtttttagcatcgatgactcaagtcagcttacagagcaaaaacctttccccgtaactccaggctctggtccccgacacggtggcttctcacaaactggacagggtgctgaacagaagacattatttttcttgatttctgagatagcaaatactgtagcctcttacgccgtatcatacaccgaaggaactttaaatttcactctaatctctaagagcgacgttctgaaccaggcatctcctccgggtcttgcgtcggctgaattgatagtttccccggatatgagatttgtccacacttcagcccgcaatgcaactctgctctctattcctaatccttcagcgtctaatgccactgctatcccctcagataccttgcaaagctggaaaattgatccaaatactggcgcgcttactttccagcaattagcacctgcaggcggacgagggccgcgtcatttttcattaaacaaagatggatcaaaggcagccgttgcattaaatggagatggccgcgttgtagtctacgaacgtaatgtcgaaagtggcgagtttggaaagatgattgtgtcggcaaatgtagaaggggagttgagttgtgtcatctgggatgagtaa

SEQ ID NO: 135 - DNA, 543 bp, Golovinomyces orontii
  source 1..543: mol_type = genomic DNA
atggttcaaaagagtgataaagctctcagtatatgtacctgtgcaagatgctctttcagtcacaaagtcagaatctttacatcgtgtcactctttctttccttacgagccaaatatgttgtttggagctgtcggtcgaatccgtttcgaagtcttacttatctttttcattgtactcaaagtctatggagttgacaaattttcaatgattccatcctcgataaatatgaattgcggaggaaaaaccatcacatccgaaatactcatcaaatttgctaaggaaggctgctggctcgtcatagaatcaattgagaatcctgcgccacgtcccttctcgtccgcctggtttttaattaaaaataaggccgtagctcctgagccttatggtaatggacgttcagacaagaatgaccaattatatcaattaaacatcaaaccgaaaaatcccatacgtaagtattacataatggaatacataaaaatccaaacctacgcttcattgcagaatttttttatcagccttttttatcgtttcttcctctga

SEQ ID NO: 136 - DNA, 282 bp, Golovinomyces orontii
  source 1..282: mol_type = genomic DNA
atgtcttcgggtcagagaaatcttccagtcttcttgactgcttgttcagggctgctcggaagtggtggaaagttctctagttgtttctacgagtttgtgaccaacagatatcactactctacaattagtcgaattatcgacattgggatgttggggcgggcagcaaaagaatatatccctccgcctcttaaaccagattcacaaaaagccttactattttcaagtgatcgagtccgacagggaaatactgaagaactcagaagggcggactatccaaaataa

SEQ ID NO: 137 - DNA, 564 bp, Golovinomyces orontii
  source 1..564: mol_type = genomic DNA
atgaatacatcaaccattcagattcttagtcctcgtttggaacatgatggatatgtcaagtacaccaatacaagattaccggccataagagctttgagtaaaattagactattcttacgttcggaattggacgtgccactcaaaaggcaacccaccttggcaaaacagtaccagaagagaaatagcgaaaaatgcagggtgatgagaaatgagttcgattcgttcatcgcatcagcaacaagttttctagatgcagttaaaattaaaaggctggagcgtacgaagccgcacaccgttggcgatttcatgaatgaaattaattatcgattgttctccttatcaactcatactctaaaagagaaacgtttgatacgtaagcaattgcgtaagatacaaaaactctgggcaagtcgcaaaggtaaccttcaaaatcgtagttttatcgagcagcaacaagcactttatgaatcgacccattgttttgatctgcaatttgatgaaattctatctaaaaatcgtaagattaacgataaattactcgatttaatcgaatactttacatga

SEQ ID NO: 138 - DNA, 657 bp, Golovinomyces orontii
  source 1..657: mol_type = genomic DNA
atgcggtcgaacattatcaccttaatttcgactctccttttttgttcacttcccgcccattcgtcgacaatctttcccagacaatctgatatcgatgtctcctctggacaagaatctactcatgttcagatatctgttacaatcgacggccagcgttgggattcagattctcatggttcttgtccaaaaaaggaaaacaattgctttgggggaagagaaaagagcaagaaacttggcttcagatgcggtaaaaaattcttttcaaaatctaaagttttaagagccgcgagtgctgcttgtcccaagatcgagaaaaattcccagagacatgtctatcctgcagcatatattgcttctacatatgatgtcgagggtccttattgggagtggccaatccgtcgaaatggtcgtttttggaacatatgtacgtataataaatccgttcgcacacgggctttcgagatgctaaccacgttgaacagtcagccgcagcaagtaccgcatcatcttgaccaaatcttgtaccgtggttggtgctgtaatccgcaacaaaagggatcacagctacaagcaatgcgaaccggtgtggtactgatgaaccagagtgacgcgggaaggcttgagtgggggcacgattttgaaacggcaatatgttaa

SEQ ID NO: 139 - DNA, 657 bp, Golovinomyces orontii
  source 1..657: mol_type = genomic DNA
atgcgttcattcactgcggctctcatctccacccttctactgtctcccatctctgtcttatctacgaatcatgaaaataactccgacctgcaccacgtaaattcttctccgcatcagaagtctctcacagtcagtttacgggttaaatataacgacgaggatagagaaaggacatgtcggatcgatgatgaggaatatgaaggggaatatgaagaggaatatgaaggggaatatgaaggggaaaagagagagaaaaagaaaggaaaagggaaacacatgtgtaaaaatgtacacagttgccaaaagaaatccaacatgtgccgtggtgatggtatcagtccaaaggacggctatatgtgcgggaaaaagttcattaaactttctaaggttatgaataaggcaaagaaggtctgtcgtcaaataaaaaagggtaacgatcagaaattacctgcgctctacactgcaggtggctttggaaagcagccatataccctatttgagtcgccactctacaacaaattttggaaattcggttataagcaacagtatcgcctagtcatgtcacgagaatgtactgttgtcggtacagtggtccgcaacaaagacacaagctactcccagtgcacattcgggcccagactaggtcgtaagcattag

SEQ ID NO: 140 - DNA, 420 bp, Golovinomyces orontii
  source 1..420: mol_type = genomic DNA
atgcaattcactcaacttctcatcttagccttcgtcgcttgcgtggctgctacaccatcaggattgaacttttacgcgcgaagaactgacggtggagacgacgaatcaccacagacatgtactcaggccctacaagctattcccaagtgcgctctgagttgcatcacacaacccccaatcgacgccggttgcaaatcagctgctgacttcgcttgcacctgtgagaaaaagacccaaaaacaaattacaaaggcagaaactccttgtgttctcaaggcttgcggactaaaagaggcacttgctgcttctaaggctggaaaagctgtatgtgaggcttgcaacacatccccaagcgacccatccgacggtcacggtgacgacggagatgacgattcatacgatagctctgattctgaataa

SEQ ID NO: 141 - DNA, 2267 bp, Golovinomyces orontii
  source 1..2267: mol_type = genomic DNA
ttttacttttctttttcccgcgaattcgagacgtggccttaagggttgaggttataaacgagcaatttcccactcgcgcacagttcctctcaagataacttctggttacccactccttcaagaaagaaattttaggccattcatattgaagaatccaccaaatcagttagcgtcacatcacttataatcttgatcgaaagatctaaattgcgaatatggcttcgccaaccaatagaagctcctttctaatatggatttctgctttactttatacaatctttctcttttcacctttggctttcgtgaactctgtagaagcagttgatcaagcaccattgcaagagaattatggcactgtcattggaatagatttaggcacaacttactcttgtgttggtgtcatgcaaaaaggtaaagttgagatattggtaaacgatcagggaaaccgaatcaccccttcatacgtcgctttcacagatgatgagcgcctagtcggagatgcagcaaagaaccaagctgccgcaaacccaaagcgtaccatctttgacatcaaacgaatgatcggtcgtaaattcgaagaaaaggatgtccagaatgacatgaagcactttccattcgatgtagttaagaaagatggaaagccaagcgtaaaagttgaagttaatggctcctccaagactttcacacccgaggaggtctccgctatgattcttggaaaaatgaaagaggtagctgagtcttatctcggaaacaaagtcactcacgccgtcgtaactgttcctgcatacttcaatgacaatcagagacaagccactaaagatgccggaacaattgcgggtctcaatgtgctccgcattgtcaacgaacccacagctgcagcaattgcatacggtttagacaagacagatggagagagacaaattatcgtttacgatcttggtggtggaacctttgatgtttcccttctctctatcgatcgtggtgtctttgaggttctttctactgctggtgatactcatcttggtggtgaagatttcgaccaacgtgtcatcaactacttagccaaaaggtacaacaaggaaaaaaacgttgacataactaaggacctcaagaccatgggtaaactaaagcgtgaagccgaaaaggctaagcgaactctatcttctcaaaagactacccgtattgagattgaggccttccacaatggtaacgatttctctgagactctaacccgcgccaaatttgaagaacttaacatggatctattccgcaaaactcttaagcctgtcgaacaagtacttaatgacgcaaaagtcaaaaaagcagaggtcgatgatatcgttcttgtcggaggttcaactcgtataccaaaagttgtggagctcattgaagagtacttcggtggcaagaaggcttccaagggtatcaacccagacgaggctgttgcatttggcgctgctgttcagggtggtgtcctatcaggagaagagggtactgaagaattggttctcatggatgttaacccccttacccttggaattgaaaccactggtggagttatgacgaaactcatcccaagaaacactgtgattccaacccggaaatctcaaaccttctccactgcagcagataaccaacctgttgtcctcattcaagtctttgaaggagaacgcaccatgaccaaagacaacaaccaactcggcaaattcgaactcactggtatccctccagcaccaaggggcgttcctcaaattgaggtgtctttcgagctcgacgcaaacggaatcttgaaagtttccgcagctgacaagggaaccggaaaaaccgaatcaataacgatcaccaacgacaaaggacgcttaacgcaagaagagattgatcgcatggttcaagaagcagagaagtatgccgatgaagacaaggctaacaaggaacgtatcgaagcccgtaacaatcttgaaaattacgccttctctctaaagaaccaggtaaatgatgagactttaggatcgaagattgaggcgagtgacaaggagactatcctggaagcagtcaaggaagctacctcatggttagaaagtaatggccgagacgcaactgccgaagattttgaagaacaaaaagaaaaactatcaagtgtcgcctaccctatcaccagtaaattatactccggtgctagcggtgccagtggtactgaaggatcagatgaacctgagagtcatgacgaattgtaattggaacatgaaccgattgcacactcacgaaaa

SEQ ID NO: 142 - DNA, 596 bp, Golovinomyces orontii
  source 1..596: mol_type = genomic DNA
tgtcactatttcactgtctcttccaagaaaaccgaagtgatcaatcctccatcttgattcagtgattttctctttacagtcgacgctcgttttacatcttcaaatacaatcatgcgtatttctctattcaccgtttttggcctctgcgtcgcagctgctgcctacccagaattcgtgaagcgagacgaccaacctgaaacaaacactacaatgtctagtccttcctcttacactaccacaatgacctccggcacagccgtcggcaccggtgtagagaccgccactgctatcacctctggcgtattcaccaactccacatccacatcatcaggctacgctagtacccctacttcgatggcacacaaatcatcttccacttccatgtcagagacaaaaacttcatctgctggagctgctccaactggcgtatgggaaaacaccaacgtgaaaggagcaatggcaggagcaattggtatccttggattggccttagctttgtaaggagtcttcagtgtttgtgaaaaataaataatgtagtcggacatttggtatacgtttaataagactgtattttttaataatcaaggctcaattta

SEQ ID NO: 143 - DNA, 1115 bp, Golovinomyces orontii
  source 1..1115: mol_type = genomic DNA
ccatacccactcatcgatatctcagctttaataaaaagtagtctgccacttctttttccccttgagattaataaccatcattcttgtacgcattttctggaataatacctagttttataaaaaccctccgaaaatgaaattagctcgaactatcgccttaagctcgaccattgctgtcgctctagcacagtctctccaaagtctacctgattgcggcaaattatgcgtaaataatatgttggctaaggctagagaacttggctgtgcagatggagatacagtctgtttgtgcaagaacatcgattttgcctacggcattcgtgattgttctcacgaagtttgtggacctgagcaagcaatccctgttgtcgcatatggatccaactactgtaaatccgttacgggaaacgatggtggttccaacacacccggtggtaaccccttactcgcaccaggacatccttcgtcgacatctgatgtctcagtagtatccacgaccacgacttacactcaaagtatgagctcaaatgccaccagtacaatgtcatcaaccgcaatcacatcgcccgttgtcactaccattacatctggagaagatgtgattactagtacgatcggatctgcgacaatctccagtagccatcttgtcccatcttccacaagcagcagctccagctcggtaagtcttttttcaaatggtttcccaccagctctaacatttaagcagccaacctcggatgaggatcagccaacttctacttcttcggccggcgcagccaaacagactttctacgctggtttcgcagctgttgctggaatcgccgcattggttatttaattgtctcggatgacgagaaaactgctaaacagcattcatatcgcccactgtgaacgaagtaatgaccttaaagttagattctgaaccgaacttggcgcggacttatgttttatacccttaatttttaattatcctgcaaaataccataacgcagattttattttcattcttatgatcctgtgcctagtctagtgaagtaaaatattttgttcattcaagtctcgatgacatgctcctcagctgtgcgaaagaatttttgttgatatgaacactaaat

SEQ ID NO: 144 - DNA, 607 bp, Golovinomyces orontii
  source 1..607: mol_type = genomic DNA
attgtcactatttcactgtctcttccaagtactcagaagaagtgatcaaatagccatcttgattcattgatcatctctttacagtcgacgctcgttttacatcatcaaaaataatcatgcgcatttctctattcaccgttttcggcctctgcgtcgcggctgctgcctacccagaattcgtgaagcgagacgaccaacctgaaacaaacagcacaatgtctagtcctacctcatacactaccacaatgacctccggcacagccatcggcaccggtgttgagacagcctctgctatcacctctggcgtattcagcaactccacatccacatcatcaggctacgcaagcacccctacttcgatggcacacaaatcatcgtccacttccatgtcagagaccaagacatcatctgccggagctgcaccaactggcgtctgggaaaacaacaacgtgaaaggagcaatggcaggagcaattggtgtcctcggattggctttagctttgtaaggagtattcagtgttggtgaaaaataaataatgtagtcggatatttggtatacgttgtaataagaatgtgtactttcttttaataatcaaggctcaattta

SEQ ID NO: 145 - DNA, 1869 bp, Golovinomyces orontii
  source 1..1869: mol_type = genomic DNA
atgaatccaataatggaatggaacaagcctcgtcatccgtatcttcatggaaacttcgctccgatccgtcatgaaatctatctaacgccgtgtaatcatactggagatattcctgatgaacttgtgggtgggcaatatgtccgtaatggcgggaatcctttcttaaatgagaacgtagaacgggaggcgcactggtttgacggagatgggatgctcaatggtgtcatttttcgacgagcaaaagacggttccatatcgcccgagtttgtgagtcggtatatcttgacagatgtatatctcgcagctcttgcctcactttcttttcgtcatcccatcgtacctagcattgcaacgcttatcaacccacactcatctctattccatatccttgaaagtatctttcgattactgctcatagtaatcctatcctatttgcccggctcgactcaggtgatcaaaaggattagtgtagctaacaccaatatcttataccatgatggacgggctttggcgacctgcgaaagtggcccaccaatgagagttgttctccctcatctggatacagtcggttggttcgatgggctgaaggtagggggagaaaaggctaccgatgaatcggacggtcaatcctttgcgaaagaaggaacctttaatgtattggatggacggacaactgcacaccctcgagtagatccaataactaaagaactcattttatttcactcaactttttttgcatcttttgtctattattcagtcattcccagtacatacctcaaaaagcccgaccgtcaatcccctcgccttatcaatgttcctatacccggtgtgcgttctgcaaagatgatgcatgatatgggagttagcaggaaattctgcgtcatcatggatctaccgctttctcttgatccactaaatctggctcgcaataagccagtcgtgtcatatgatccatccgagccttcacgatttggggtttttcccagatatgatcctggtgctatacgatggttcgaaacagatccatgttgtatttttcatacggcaaacacatgggatgagattatatattctgacagcttaaaggcaaatgccgatatcatagcagtcaacatgttggcttgtcgtctaaccagtgcggcagttgtgtatagtgctggaaatattgctttgccaccctccgaggcaaaagtgtgctccatgaacctctttgaagaggaacaatgtcgtctctattactatcgattcctcctctccgagactcaaaatattattactcaccagttcgccttgagctctatccagtttgaatttccatcacttcgccaagacatatctatgtccgaagttagatatatatatggctgttcgttatctgataaaacattcggagctgctctgggtggagctgctaagattgattgtttagtgaagatggacgccctatcattgataaagcgtgcgcaggactcagcacccacaccagttatcggatgcgttgataatagaacagtcgcagagattattcactccaaggatgaagaagacgtaatcaaagtctttaaactaccagaaaatcattatgctcaagaacctcgctttgtcccgcgtcgtaatggtaaaagagaagatgatggctggctgctttcgtatgtttttgacgagagtcagcttgattcacatgggcatgccaattcagattccaagagtgaactttgggtcattgatgctataaacatgaaacaggttgtatgtaagatccaactaccgcaacgggtaccatatggtttgcatggccattggtttagtgaagaagacataataaaccaaaggccgattgacactacacgtgtccctgagtcgttctag

SEQ ID NO: 146 - DNA, 912 bp, Golovinomyces orontii
  source 1..912: mol_type = genomic DNA
atggctcaatccccggacagtaaggtagagaaagtctttacgacaaatcacctcggaattggcaggctccaaggaaagaacgcaattgtgaccggagcagcaggtggtatcggcttggaaacatgcattttattcgccagagaaggtgccaatgttcttttggccgacatttcagctccagccctagaaaaagcatatgccaagattgctcaacttgtaccttcggctcgcaaggtcgagaaaatgctatgtgatgtttccaaggagggagacgtcaaagctatggttgaccatgttgattcatggggtggtgttgacattatttttaacaatgcgggcataatgcatgctgatgatgctgatgcagttgacacccctgagaagatttgggatctcactcaggctatcaacgtgaaaggtgtctggttcggctgcaaacatgcagtcatctcatttcgaaagcataaaaagtcaaagggctgtgtcatcaatacagcctctgttgttgctttggtgggatctgcaactccacaacttgcctacaccgcgagtaaaggagctgttctagctctaacgcgggagcttgcaattgtacatgcacgcgaggcgccgttgaacactcccttacttcaggattggcttggagatgaccagcctaagcgacttcgtcgggaaattcattttccatgtggccgcttcggcgaagctgttgaacaagctcgtgctgttcttttcttagcttccgatgacgccaatttcattaatgggcaggaatttgttgtcgatggcggaatgactaaagcatatgtgactccagaaggtcccccgaccgaggcgcctataaataactcattactctctgagccaatcgataattttaagaccactaactcatcagacatgggagtttga

SEQ ID NO: 147 - DNA, 3561 bp, Golovinomyces orontii
  source 1..3561: mol_type = genomic DNA
atggtggcttctgtccttggtgaatttttcttaccgacacggcagtctggatctaattctgagctggctgctggtccacaatttataaataagagaataactccattggttcaaagcctttctcgtagagcatgtttacaccctatacacacggttgtaattgttgcccttttggctagtactacctatattggtttactagagagtagtctattcgacagtgtaaattcgaatacaggtggcaacatagatttcgagtcactacaagaagggagcagacaactgcgagctggtcctgagactgagtggaaatggctcctcaccgaatcaaatgttcacggctcagatacagatcatttatctattctaacatttgctttcccagactctttgtccgaaagctctgcaggaataccgttagaaaatgtctcatttcctcagaatatctctgtcaaaagacttccgtcaactccaaatcaaccggccaatttcaataatgagattactttggcttattcggtacccgctagtcaaacactaaattttttatctgggcttcaagagctccccaacacaagcattaataataattttcgcaacgatcttcataaggaccagcccctcatagaacaaaagaaatggatcatgaaaactgcaaaaattacattttctagaacctctatgaaaagttgggttaagaattcttggactgcatttatagatctgctcaaaaacgcagaaccactggatatcattattgtcgtattaggatacatatttatgcaccttactttcttctctctgatggtctcaatgaggaagatgggctcgaaattttggctttttggaatgactctcctctcttctacttttgcttttctgttcggcctcatagttaccacgaaaatgggtgtggctctaaacatgattctcttatctgagggtcttccctttctattagtaactattggcttcgataaatctattatcttaaccaaagctgtactttcggctgcccttgatatcaagaaacaaccaccaagtccagatactttgaaactatcaggctcggctgttaatcaatgcgcttcatcaaacccaattcaatacgcggttcaactagctatcaaagaaaaaggatatcaaatagttcgggattacttcattgaaatttgtatcttaaccatcggtgccatgtctggagtccaaggtggccttcaacaattctgctttcttgccgcttggatcctattttttgactgtatcttgctattcactttttacacagccatcctaagtataaaattagaaataaatcgcatcaagagacacgtagctctacgtcaagtcctagaagatgacggcgtcaatcgaaaagtagctgaaaaagttgcagaaagtaatgagtggccaaagccaagtctagtaagtagcgacatgactaacatcttcggacgcaagataaaagatagtatcgtacctaactttaagatcctcatggtcactgggttcatcatagtcaatgttcttaacatatgcacaatcccctctcgtggaagtcaaagtaatgtcgcatcaactagtgccaatggattttctggccaagggaaaatgaatgaaacaattttaccgtcaataaatcctctagagctcgcatcaaatgggctagatgaaatactccaaactattcaggctcaagataaatctatattagtcaacgtttttccactcattaagtacgaactcgaatatccttccatacattatggatggaaatcacgagccgtaggctatagcaggaatctgaatgaaatctatgatttgagcgaatatggcgtaagtggtcgtgttttcgatagtcttttaaaaagcctagaagatcctctactttctaaatggatcatgttagctctcgtaataagcattgcgatcaatggctatctcttcaatgcagctagatggagtattcaaaatcttcctcacgtgcttccaactcgtctccaagtaaatcaaacagaagtgttcaataacaaaaatccatttcctgattcaaagcctcaccccagtgatagaagttcatcgaaaagtcctcaaaaatataccgacgtggatctggaggataaaaaagaagatgcaagtttaaaaacagacgacatgcctaaaaggcgaactcaagcagaattagaacaaattctcaaagaaaaaagagctaacgaacttgaagactctgaactcatagaactttccctccaagggaaaattcaaggttatgctctagaaaaaactcttaaaaatactacccgagctgtcaagatcagaagagctcttatctcgcgaaactcatcaacaattgaaagtacaagtctcttagaacactcaagactaccgtacgagcaatatgattgggaccgtgttcttggtgcttgctgtgaaaatgtaataggttatatgcctttacctgttggtgtcgctggtcccattgtcatagatggtaagagttattttattccaatggctactacagagggtgttcttgtggcaagtacgagtcgtggtgctaaagcaatcaacgctggtggtggggcaattacggtgataacaggggatggtatgacaagaggcccttgcgtagctttcgagactttagatagggcgggagctgcaaaaatgtggctcgattcagagacaggtcggaagatcatgaccaaagctttcaattctacaagcaggttcgctcgactacaatccataaaaaccgctcttgctgggacatacctgtatccacgattcaagacaactactggagatgcgatgggaatgaacatgatttcaaaaggtgttgagcatgctttaaacgtgatggctacagaggccggatttgaggacatgcaaatcatctcagtctctggtaacttctgtaccgataaaaaacctgctgctatcaattggatcgatggacggggaaagagcgtggtggccgaagcgataattccgagagacgtcgttcgaagtgtcctaaagactactgttgatgcgatggtggaactaaacatttccaaaaaccttgtaggtagtgcaatggctgggagcgttggtggctttaatgcccacgcagcaaacattgtaacagcagttttcttagctactggtcaagatcctgcgcaaaatgtcgaaagcagtaattgcatcacattgatgaaaaaccttggaggaaatctacagataagtgtatctatgccttctattgaagttggtacattaggtggtggcacaatacttgagcctcagggtgctatgcttgatatgcttggtgtgagaggatcacaccccacgaatccaggcgacaacgctcgacagctggctcgaataattgcagcggctgttctctccggggaactatctctttgtagtgccctcgcagctggtcacctagtgaaaagccacatggcgcacaatcggagtacacctgcccctgaatctacgcctaatcccgtaatacaaacaaccagcatcattaaggaaaaagtcgttttgacaatgacaaccgatgccaaggtataa

SEQ ID NO: 148 - DNA, 1668 bp, Golovinomyces orontii
  source 1..1668: mol_type = genomic DNA
atgttcttgtcaaatgagtgcgagagtctagcgtgctcgactctgggagcctcgaatgcgtctcgctcatccagcaccaccggatcaaccttagctatctcaatatccctgattcctttcatcgcatccttcctcacggttggattccttctctattctaaattattccctttaatctcgcaaccgacgaatgaaaaacatctattaaactctttatccacgccgagagatatacttaggttaagtttaccccgacctgtcgtcgatcctatatacgagaaaaaaattagcagaaatcgagatgtcggcctcaccttctcaatcactatttctctggccgcggtccttgtcgagttaattctctgcgagatttcaaataccttacacccggaagctcgcgcacttgcacttaaatttatcctaccatcacttctcttttccttggtcttcttaataccatttctcgaattaaaaaccatcatctcggctaccggatggaattttaaaagtgcagagagtggcaagatatcccgaatcacttgtcttctacagacacttggtttctctttatggttgatatgtttttggtggtcgggcaagagtactcatactttcactattgcgccaggaaaaaacaagggattgacagcagcatgtttggatcgagtgggaataattggtattgccctaatggctctactgtccggatttgcgtcagtctcggctatatggcacacttttggagccagattaagaatggtcaatgaaacagatatctcttgtaaacaagcaggtcttaacgccacgaatgaactattgtctgataagcaaagtcgactacgggcactacagcgaaaagtgaaggagaccccgaatgaagatttcatgaccaaagttatcggaaacattcgtggaaattctgatgcgcaggaaatcgcctatcttgaaacggagatatcagggcttatgcacatgacttcaaacctctcatcatccgtcaatcttcttcaaaatcgacttgcacttagtcgaagagcatccacccgcttaggtagacttattctagtaccaatatcacacggcttttctatatattgtatctatcgcatcatatcaacaattctgagcaatgcacgacgtctgacatactcctcacccgccccaaccatctatagccctccgagtacagatccaataaatcgcatactttcccttgtggcaaaacatgtcgatccgagcttgaatcaactggcttggtctcgtcaaatatctttcctcttatctggtgtcatacttcttgcctcattcaactcagtcctcaccacatttcaaatgcttacaaagcttacgccttcacttcttcgtcaaatccaagctaatctggcacttttgattactcaaataagtgcaacttacgtcatcagcagtgctctattactacggagtaatttgccaaatgagatgaagagcatcgtaaatgtagctctaggtagtccattagagcccatattcgttgagagatggtttgatacatggttcctcttggctactctaggtacagcaataggtatttggatcagtcgaaaattgaacggacaagaagctattggaacttgggatgatatgcaatttgagggagatattgaattagatcagaagagactatga

SEQ ID NO: 149 - DNA, 2016 bp, Golovinomyces orontii
  source 1..2016: mol_type = genomic DNA
atgtcttctatacctcaatgggtcaaagacttgaagccttcctcaccgcagggaagtgagcttctccaggccgaaagacagaaatcaagtatatctatcgagggcttatcaaaatttctctatacatcagaggccttgaatcgacgcaaagaaattctaaaaatcctccaggctgagaaaatattcgacaagtcacaaaactactttgatggccgagtagatagatttaagacggcacttgcccgagcgaaaatgttaagaaatttagagatcaagcataaatggacttccgatcacctattagatgcctcagatctcgtcagtgaggcaggtcctatggacttcatgctagctactctccaaaatcaaggtacaccagaacagcacaagttattccttaagccagcacaagattacaaatatattggctgctatgctcaaactgagctcggccatgggtctaatgtcagaggattagagaccacggctacatggaatccagaagacaaaacattcattcttcactcaccttctttgacatcgtccaaatggtggatcggttcactgggtcgaaccgcaaaccatgctgtggttatggctcagcttattattgctggcaagcagtatggtcctcatcctattgtgtgtcaagttagagatttaaatactcatcagcctcttgagggtatttacgttggagatataggtccaaaatttggctataacacaatggacaatggatttttgttgttcaataaagtcaaaattccccatgttaacctgttagcaaagttctcaggtgttgatcctaataccagcaagtatattcgaccatcctctgcttctttggtatacggtacacttacttgggtgagatcaactattgttctacaatctggaagtgtgcttgcccgtggtgtaaccatcgcaatccgatatacggcagttagatgtcagtttcaagatctagaaaactcgacaacttcaaaaggcgaaaatcaggtcctcaattatactatggttcagtatagattgcttcctctacttgctgcaacgttcgctttacattttaccggaaaagcaatgatgggtttatacaaaaaaaatcaaatgagaatggaacaggtcccagaaaaatctgcagataaaaacgaaagcgagatgttggccgatcttcatgcaacttcttgcggattaaaagcgttagctagtagtactgcagctgaaggattggaggttgcccgaagagcttgtggtggtcatggttacagtagttttgccggtatcggttcatggtacgctgattacctaccgactccgacctgggaaggagataattacatgctgaccaacaagtggctcgctatgtatttgttaaagtctgcacgtgccgtgatcaatggtcatgcctcaaataacgatacttcaaatattctaagattgtttttagaaaaacaagacaccggtgctgctcatgatattcttatctcggacagtgacgttgtttccgcgttcgcttggcgtactgcataccttacatttgaggccttaaaacacagggatgtggagaagaaaacttggaactctttattagtcgacttttggcgtctgagtaccgctcactcgcagtaccttgtcgtgaaaaatttctatgaagttcttcagagcgaaagtacacgaaaagagcttgatccaaatactgtcggtgttcttcataaactttttcgtctccacgcacttagtacaatcgagaaagaagcttcagaatttttctcatcaggcgctctaacgattcgtcaaatccaattaacgaggaataaagctgtgatgcagttacttgaggatataaggcctcattctttgaatttggttgatacatggcagttctctgattggcagctggactcatctctaggacgctacgatggcaaggtttatgaagatatgtttcgcagagcgagtgagctcaatcctctcaactgtctcaccattgaccttatccggatagtactgtga

SEQ ID NO: 150 - DNA, 867 bp, Golovinomyces orontii
  source 1..867: mol_type = genomic DNA
atgagatcagtggtctatcgtccaaatgcatggaaaattagatcatcaatattactacccaagagtttctcctctcaacccttgatttcttatgaatttatccaaacatcaaagccccgtccaggcgttgggcaaattactctaaatagacctaaagcccttaacgctctggtcacccctatgatggtagagattagcagagctcttcaggcgtttgaccaaagctctgaagtttcagctatcgttctcacaggttctcaaaaggcattcgctgctggtgccgatattaaagaaatggaaaatctgaccttctccgaagcttacacgacttcattcattgagttctggtctgcttttactacatccgtaaaaaagccaattattgctgcagtatccggtcatgcgctaggtggtggatgcgagcttgctcttatgtgcgatatcttgtactgtactgattccgcaaatttcggacaaccggaaataaaacttggtataatacccggtgctggaggaagccaaagattatcgagagcaattggcaagagtcgagcaatggaattgattctcacgggtgagaattttagcggcaaggtggcagcaaactggggtgttgcctcaaagagttttagtacgtgggatgaattaatggcaggcactttaaggaccgctgagactattgcaaagcacagtaaagtagctacaatggcagcaaaagaggtagttaataagagtcaggatttagctttacgagatggtgtagaatacgagagaagagttttccacggtttatttggaagttctgatcaaaagattggaatgagagcctttgcagaaaagaaaaaaccacaatggacccatagctaa

SEQ ID NO: 151 - DNA, 1293 bp, Golovinomyces orontii
  source 1..1293: mol_type = genomic DNA
atgtctgccgcccaaaaaagactcggtcaagtttccgaccaccttgccggcgtgaaaaatatgataacttcaactatgagtcaacctgctacaactagaagggatgcaattttaataaagcgccccgatgatattgttgttaccgcctgtctacgaactccattcacaaagggcgggaagggtggtttaaaagatacggctgcctctgatctgctggttgaggcattaaagagtttaatctctcgctctgggatcaatccagctttagttgaggatattgcagttggttctgtattagctccaggtggcggtgctactgaatttagagcagcagcgctaacggctggatttcccgtctctacatcagtaagaagcttgaatcgtcagtgtagcagtggtctacaagcctgtgtggatatagcaaacgcaatcaaggcaggaatgattgaagtcgggattggagcaggagtagagagtatgagttcgcaatatggaccaggtgcgactagtgagttttcagagcttctccagtcccatccggagtcagcaaactgcaaagtatctatggggcaactatcagaaaaaatggcaaaagaccgaaatatcagccgcaaggttcaagacgaatttgccgcggcttcatatcagaaagcatttcgtgcccaagaatctggattttttgacgaagaaattattccactaaacgtcagatgggaagatcctaagactggcgagttcaagaatattattgtaaacaaagatgatggcgttcgtcctggagttactgcgcagtcgctctcaaagattaggcctgctttttcagaaaatggaactattcacgctggtaactcatcgcaagtctctgatggcgcagcagccgtactgttaatgaaacgctcgacagctgagcgcttacgtcaaccaattattggtaaatatgttgcggcttctgttgtgggtttggcacccttacttatgggtatgggtccctgggccgctataccaaaagtctttgagaagactggtctgactaaagatgatgtggatacattcgaaataaatgaggcattcgctagtcaatgcgtctggagtgctactgaactagggctagacttcgagaaattaaatcctcagggcggtgcaatagctttcgggcatccactgggttgtacaggcgcgagacaggttagcacgcttttatatggattgcgacgaagaggtggacgcgttggtgttactagtatgtgtgtagggacaggaatgggcatggcggcagtctgggtggctgagtag

SEQ ID NO: 152 - DNA, 1230 bp, Golovinomyces orontii
  source 1..1230: mol_type = genomic DNA
atgtcaacctttggaacatactttaaagtcacaacatacggagaatcacattgcccctctgtaggatgtatcgtggatggtgttcctcctggcatggagttaacggaggaagacattcagccgcagatgtctaggagaagacctggtcaaagtgcactgacaactccacgtagcgagaccgacacagtccatattcagagtggcactgagtttggcgtcacattaggaactccggttgctatgatagtgaagaatagagatcaaagacctcatgactatggaaattctacaatggatctttatccgcggccaagccatgctgattggacatatctagagaaatacggtatcaaagcaaatagtgggggagggagaagtagtgcgcgggaaacaatagggcgtgttgctgcaagtgctatagctgagaaatacttatccttggcccatggaatagaaattgtagcatgggtgtcatctgttggagatttgtcaatgtttccacctaccacggagtatcctactccatctactaatccttccttcttatcgttgatcacaaaaatctcaagaaaggaagttgacagttttgttcccgtgcgatgtccggacgcaaccttgtcggaaaagatggcggagaaaatcgcccattacagggaccaacatgacagcattggtggaacggtgacttgcgtaatcaggaatgtccccagtggcctaggagagccagcttttgataaaatggaggctctattggcccacgcaatgctcagcattcctgcgtccaaaggctttgagataggatccggctttggtgggtgtgaagtgcctggatctaagcacaatgacgcctttgtaccctcgacagaatcgtctccagcgaacactggagcttctagaaacggcctgctgagacccaagttaacaacaaagacaaacaactctgcaggtatccaaggcggtattaccaacggggcaccgatttatttccgggtagcatttaagccaccagcaactattggtaaatcgcaggctactgcgacatatgatggagacgaaaatggtacattggaagccaaaggtagacatgatccttgtgtggtcccaagagctgttccaattgtcgaggcaatggctgcacttgtagtcatggactctcttatggcacaacaatcaaggcaagtcacgagaagccttttaccacaattaaaacgaaactcggaaggaaaataa

SEQ ID NO: 153 - DNA, 792 bp, Golovinomyces orontii
  source 1..792: mol_type = genomic DNA
atggatgctgcgattgatcttttggatccttcctcggcactagatctcaatcacattcggaaacagttaatccgaatggaagacactattacttttcaacttattgaacgtgtccaatttccgataaataaacgtgtctatgagcctggagctgtgaaaatccccaacagtagccttagtttccttgattggactcttcgggaacgagaaagaaccgattctttaattcgtcgctatgaatctcccgacgagcatcccttctttccagatgcactcctcgaaccaatactaaaacctatcatttatccaccgattctacaggttaatcatgtcaacttaaacaataaaatcaaagaatattacataaaacacattcttccgtcgatctgcctggattttggtaggaaagatcgaggagaacaaggagagaattatggctcggcagtaactgcagatatttcggtcctacaggccctttcacggcgtattcattttggcaagtgggtagctgagtccaagtatcagaaggaccccataaaatttaaaaagatgatcaaggccaaggatcgtgaagctcttgcagacgctataactaatactgcagttgaacagcaggtcctcgagagaatacggttaaaatctagaacttatgctactgacccctgtaactgcagtgacacacgaccgaaaatcggcgaagaagctgtagtagcgatatacagagactttatcatcccgtttaccaaagaggtcgaagtggagtacttgatccaacttgatccgaaagcctag

SEQ ID NO: 154 - DNA, 1365 bp, Golovinomyces orontii
  source 1..1365: mol_type = genomic DNA
atggcggtctgtatctcttgtcaaagatacgttaatccttcctttgataccgtaaaaaggattattgagcagactcatcatagagaagatgcacccaacttagtaccactccttcgagaattctccttgactcatcaaactgcctcagatgtataccttaaggtatctaactcttcaaagtccgggttctcatttcttttcgagatgcaacagatcaaaagtcatggtgaatcaattgatcctttatccaacctggagaaagaattggcccaaaagagaatagcacaagttcctggacagatcttacctccaatggtaggtggtgctgttggctatatcggttacgactgcgtgaaatattttgagccaaaaacagctaggtctatggttgatgtgattaaggtccctgagtccttatatatgttcctcgatactatggtagctatcgatagaataacttggaatgctaaaattacaaccttcgtccacgttcctcatgacttatcagaacttcctgatgcttacagcgcgcacggaaagaaatcgaatccgccagtcggatatgaaaaaagtgtcaatactcttaaaaatcacataatcaaaggagatatcattcaagcagtcccatctcaacgtatttcatatcccacattagctcatccatttcatatttaccaagctttgcgggaaatcaacccttcgccctatctcttctacattgattgcaaagaatttcagattgaaggccgaatcatcactcatcccatagccggaactgtgaaaagaactcataacaaagaagaagacaatcgtttagccgagcaattgcgaaattccccaaaggatcgagctgaacatatcatgcttgtagatctggccagaaatgatatcaatcgtgtttgtgaaccaatttctactcgcgtggatcaattgatgactatccaaaagtttagtcatgtccagcatcttgtttctcaagtctcaggtattttgagaaagggatgtacaagattcgatgccttcagatcagttttcccagccggaacagtctctgggtccccaaaggtgaaagctatggaacttatcgccgaaattgaaggagagaaacgcggagtttatgctggtgcagttggctactttggttataattgtgtggatgcatatgggaatgaaagcgagggagaaatggacacttgtatcgcgctaagaactatagcaggaggaggcattgttttcgactctgaccctacggatgaatatcaagaaacagtaaacaaggcgctttctagtatcagggctatagaaaaagcagagcagctatccaattgccaagaaccggaccaaggagaagtgcatataaattaa

SEQ ID NO: 155 - DNA, 1560 bp, Golovinomyces orontii
  source 1..1560: mol_type = genomic DNA
gctcaagctcaataaacggcaaagaagaggtcgtaacctcgtcagcctcttcggttcactcagatcagtcaacttctgctaattctactactaacggggcaagatctccctcactctctaaagaatcagaggtattgtctaaaaatcaggccacctcagccgtggacaagaaaaagaaggctcttgacgatgcagcagcgttgttgaagttggaaaagacgattaaacgtgaccttggtgcccgaacaagtttttccaagtttgcaactagtgctggcttacaggaaagtttatttggtgtctgtaaggcatatgccctctttgatgaaggagttggctacgcccaagatgccggaagatgaagcgttttgtctactcgtcaagatgatgaatcaatatcacttacgagatctttttatccaggatatgccaggacttcacatgcgtctatacctctttgaaagattactggaggattctgagccggcgttgtattgccatcttcagcgtcgtcaaatatctcctcatctctatgcaacacaatggtttttaaccctctttgcttatcgatttcctttacaacttgtactccgaatatatgatcttattcttagcgaaggtttggaagcaatcatcaagattggaatagtgttgatgcacaaaaatgccgctactcttctgggaatgtctgagatgacttctttgacaaaatatttaaaagatcgtctctttgacgcatatattgatgtggctccctcatcggggtcaatactagagtcaggtttctttggtagctctggtagcagtattgacaaagaagtttatcgtgcagatgagttaatacgtgacgcctgtgcaattaaaataactcctgaattgttaaagacgtataccatggaatgggaagagaagaatcgattagagagagagcgtgagcaagaatttgaaacgctccgatcaagcaataaaaagctatcacaaagagtgcgtcggctagaggaacgggtacaagatcatgatgccgagcacactgcacttgccacagaacttgttcgaaccaaggttcaaaatcaagaattaaaggatgagaacgagtctttaaagatacaagtacatgaattccgtgaaatgatcgaaaacgaaatcaggaagttcacgatgaaaatacccggctagaggaagatatgagtgaaatggaaaagactcttgtggagacaaagatgcaatatgcagagataaatgcagctcacgagactctcacacgcaaatggactgaccttcgcaaagctcttggcgactaaagaaacatgaaacccaactcaatgccacccgttccttcaaataatttaaaacaccacatacactcatcagtcgcatttcgcctattttacggggaaaaaaatagaaatagcttactctcactaccttcttccctcattcaccatgaaaataacgaccctgaaatggagactccatgtctaatattattgaatcaagcggaaaccaaagctttccttgacagaatttgattcatttcactctttttctgagcctggaaat

SEQ ID NO: 156 - DNA, 618 bp, Golovinomyces orontii
  source 1..618: mol_type = genomic DNA
atgtcatctcccaccaaaattatccaacagaatcctcctccaaaatctcctagggaaaatggtccaaatcgagttcaaaaaacaaaactaacacaacttcaaaaaagagctcttatcgaaaatttgcagctagagattacggaaagagcaagaagcttacgagcgcaatatgcccttcaggcacaaggacttcgtacgcgaattgagattcgagtaaatcgcatacctgttgctctgcgaaatgcttcgatgaaagacaatagctgccacccaagaatagagcttaaatccccaagcaagaatcacttacaactagcaccaagggcggtccaatacctcaaagggcgttctcgaagaagtccacatcaaaactccccatcccgcatacctgcatcacaagttctttcccctcggtccgctaattcgcaagccaaacctgaaggtgacacgttaggaacaaatactgtaccaagaaacgtggtatcaaaggctgatccaaaacgtaagccaattgccactcagaaatctagcatagattcatctcgcgtgactggccgtggaaagagattaccagcgacatctacagcattaagatcaggaagggggaggtcagcgtag

SEQ ID NO: 157 - DNA, 981 bp, Golovinomyces orontii
  source 1..981: mol_type = genomic DNA
atgtcaaaagttgataagagcagaaaatcaactatggtaaaatggaaagacgaagcaccgccagaacaagaagtcgtgaatcatttgttttcaacaatatttctgggtgacaatgctatcatcgcctcatcccctgacaaagacagagaaattagtgggctttatcaagccttggccgctataaaatcagaaacattgatcataactattcagaaaaaagtagaggggatcattgtgagaaaactaggggaaattatcctcctaccagaagagcttgatatctctctcttcagttggtgtagtctcactattcaatcaaggcagagtttactcgatgagttagataagactaagtcagatttaagacgaaaagatgaagaaataaaaggattgaaggagacccttgatcaaatgactgatttgaagaggcagcatgaggatatgcttttgaagaaatttactctactcttgaatgaaaagaaagccaagatccgcgatcaggaaagaagactcctcactttaagctctattgacaattttatggatcttaggaagccagaacacaaagttatcgccgggatcgaaaaatctctcaaaaaatcaaagcggcaggccagtcagctctacgacggtgaggacgatactgactctaagggaattgagatgatgggtattttggatgtagatgtagatgcagcagctggtgtctccgacgagaatactaagacgaccccgacagcatcggtaaccgaaactgatagcgatgaagaggaaactcactcaatatcaatacaggaaagaaacgaggcagcttccgagtcacgtattgacccagaacacgtgtcatcagtgccatatgaagctgaagaggttattttaccccctaaaagagagttaccttttatgaaaagagagaaatggacaactagatctaaaactccaatcgagcattctcatttggagtctgatgatgagttgtag

SEQ ID NO: 158 - DNA, 2754 bp, Golovinomyces orontii
  source 1..2754: mol_type = genomic DNA
agatatccatcataagtcctatgttccattttggatagaggtacagcccacgaagaatgataagtggatctctctctctctaatcatacccagagcaaaatgaatttgttaagttaattacatatccctatttcaaattatacaggatagtgatggctgtctctagagtacgtgaactcaaacagaattgctggtattacgaagtaactggtttcaagtcactctcttcacaaatgtatgtaaatagttctgacaccaaacaaatattctgtagctcagcctcgtgatacgaagtagacataatttattgtaggtctgcgggcagccaacgtcgccgcacataattagttttacaatgcacatgttttcattcccgatggattagttttaccatttatccattaaaattactctatttccattgacagaacctgaattctacttggttgcgggaaaagtatggagaaatttctgcgagattggcgtcaagatgcgcttaacaaacatcaatacgactctgccgtgtttatcggagacaaattactggccttgactcaaaatgataaggacgctttctggttggcacaagtgcatttttccacagggaattacacccgagctcaaagttttctctccagacaggatctcatagcacgaaatccttcatgccagtatctcgctgctcactgtctgattaaacagggcaaattcgacgaagccttggttattttaggagaaaaaaatccggtgcacttgattagtagtgatagtaatattcgtcgaaagttccagcacacgaatgggaatagcaaagctgcatctaaagccgatgggaggtctgacagagacaagcgggatgaagcctcaacagatgatgcaggaaatattcgatttgaagctgcaatgtgcttcctgcgaggactttgtcatgctaaacagaatgcctttgatcgagccaaggaatgttacaaagatgccgtgcgaatagatgttcaatgtttcgaggcttttgagcaattaatgaaaaactgccttatgtctcctgatgaggagtgggagttcctggcatctctggactttgactctatcacagtctctaaagatacttcctcctctcaagaagccgcagaatttactaaaacactctatacgactaggctctcaaaatacaagaatcctgctgcatttaaggcagctaccgaaactctttctactcactataacttgtcaaaaaatcccgatttacttctctcccaggcggatcttctttttacgcaatgcagattcaaagaggcattgattattaccaattatattttacaagatgataaatataacttcagtatctaccctcttcatttggcatgcctctacgaacttttaatgaaaaacgagttattccttattgcacatgatcttgcagataatcaccctgacgaaccttgttcctggcttgcagttggagtttattatctagctacgaataaagtagctgaagctcgccgatattttagtaaagcgagtatgatggatcctcattttgggcctgcttggatcggatttgctcatacatttgcacaggagggggaacacgatcaagctatctcagcgtattctacagctgcgcggctatttatgggtacccatttgcctcagctatttcttggtatgcagaatcatatgcttaacaacatgacccttgcagatgaatttttaaaaactgcttatggcttatgcaaaactgatccccttctattgaatgagatgggaattgtattttatcaccaagatcgacttttagaagcagttatgatgttttcaaaagctctagaagttgctgatgagatcgatagtgattccttggcatggttatcagctcgatccaatctcggtcatgcatatcgtagactacaccaatttaatgatgccttgactgaatttgatcaggtccttcgagagggtggaagagatgccgctgttttttgtgctaaagggctggttttaatggatttacgtcgtccatttgaagctgttcatgtctttcatgaggcattagcaatcgctcctcaggatgcaatcgctacagaattattgaataaggtgctggaagaaactctcacgagtcaaattacaaacgcaaatgggctcgataatatcgatgatgacgacattgccaaagaaattgtcagcaggaaaatggccgctacacgaaatattgagatgcgacgctctgggaaaaataaattaaaaacacaatctgcgagtaactctgggaaaaacggtggtagagtaatggattcaaaacggaatgacatttaattccctggaatctataatacgcggagctttataatttctgaaaagagacttatctatgttcttttcctagtatggagaactacattctcagtcgtaacttgtaattgctactagaagaatagaattctataacgattcgattttcagaatcgattgggctttcatctcaaaagttaaacattctacaaaaaccttggttcatctagaaagacaagttatatcttgataatcttttacctgggaaagagtagttggccagaattttatacatcgcagattgaactatcctgtttatattaatttagcgtgcggctagcgatgacaggtttttccatgcttcgacaatctcatacaccattccaaacgaccctacgatgaatgatctcctaatcgtttggttgattgattaatattttatcgtgtccggaacatgtt

SEQ ID NO: 159 - DNA, 705 bp, Golovinomyces orontii
  source 1..705: mol_type = genomic DNA
ttcgccatcctgcaaacaatcatccgcgagaaatgtggtgacagttctgcttgtatcgaactagccatctcctggttgaagtagagatttactataagatgtaaacaaacggtatctcacaatcgcaccaaatcatgccacttcaccaaatattcgaactcaatgaaatatttgcatagcatgagactttgatgatccattcattttctctaactatcagcgttaagtcagcccatgtaccgaaaccccaatggccatctttaccatcacacagatgacggcttgggctattacgaagatggcaccaaacggactttaacggacgaacaaatagctatattcagacactctgaactttttcgagaagaattacgatcaaaaagtaaacgagtcgaagatgatgataacagtagtaaatccatgaccgaaacgaaagggcttaaatccataaataaagatcaagatcagattaactccattcaaacaactgtccaaaacgaaaaacttctaaccaaaaaagcaaggaaagctatcaaagcgaaacaaaagggatacttccgtcacataataaaaccggatttaaggaaaagaacatggataagacatttctgcacgctacaatttcagactcaatcctttacaacaaatcaagactgactgaaacaagctgatgaaatttgattctaaaatcatggatatttttat

SEQ ID NO: 160 - DNA, 1719 bp, Golovinomyces orontii
  source 1..1719: mol_type = genomic DNA
atggctgaagaattaaaaaacttgggaaataaggctattgcagaaaagaattttgatgaagcaatctcaaagttctccgaggcaatcgccattgaacctacaaaccacattctatattcaaatcgctcagcggcttatgcttccaaaaaagaatatcaaaaagccctcgctgatgccgaaaatgtcacaaagtttaagcctgactggtcgaaaggttgggggcgtgttggtgcggcaaaacacggattaggcgacttaattggtgctcgtgaagcttacgaaaaaggccttaagatcgattctaacaacgcgcaaataaaatcaggattggccagcgtaaatcgggcgatagaaattgaggcgaaaggaggttggggaagcccagctgatggccttgggaacgtatttaacgatcctcagctcattcaaaaactcgctgcaaatccgaagaccagtaaatttcttgctgatcccagcttcatgatgaaattatctagcctcaagaataatcccaacgccacacaggaccttttctcagatccaagaatgatccaagtcttgggcgttctaatgggtgtggatttatcaatgatgggaaatgatgacccgtgcccagccacgaatgatacagaacaagacactgttatgtcagatgccaatacttccacatcgtcgcaaaaagtcgagccagagccagagtccattgacgaagaagcagccaaaaaagccgaatccaaagcagcggctgataaggagaaggaacttggtacacaacagtacaaaaagcgaaattttgaagaggccatatctcactaccaaaaagcatgggaattgaataaggacattatttatctcaacaacatgggtgctgtctattttgaaatgggagattatgacagtgttatcaaagtctgcactcaggctattgatgagggtcgtgagatttatgcggatttcaagatgatcgccaaatcttacgcgcggataggatctgcatacgaaaagaagaatgaccttgaatctgccattgctaattacaaaaaatcccttactgagcatagaacacctgatactgtcaacaaattacgggctgccgaaaaaaaaagcatagaaatggcacgagcagcttacattgatcctgttaaggcggaagaggctcgtgaacttggtaacgcaaagtttaaagagtctgactggccctctgccgttcaatcgtattctgagatgatcaaacgggcaccccaagaccccagaggttactcgaatcgtgctgctgcatttatcaaactactggaatttccctcagctatcgatgattgtgatgaagcgataaagagagacccaaagtttattcgtgcatatttgcgcaaagcgcaggcatactttggcatgcgcgagtactcgaaatgtctcgatgtctgtactgaagctactgaagttgataccgccagagcacacaccagagaaatagaagttcagcaacaaaacgcgttgcaggcaatgtacagtgcacgagaaaacgaaacagaagaacagacaaaagagcgaatccaaagagatccagaaattttggaaataatgcaagatgctgtaatgcaaagcattttgcaacaggcccaaaatgatcctgcagcgttgcaagaacatatgaagaatccaggaatcaaaagcaaaatccaaaaattaattgctgccggggttattcgtgtcggacgctaa

SEQ ID NO: 161 - DNA, 1800 bp, Golovinomyces orontii
  source 1..1800: mol_type = genomic DNA
atggcgggccgttttgttcgcgcgtcgaaatatcgacatgtttatggtaaatcatcacgaaaagaagcttgctatgataacctgcgaattagtcgtaacgcttgggatacaaacttagttaaggcgaatcctgaatatctcgctgtaaattgggaggcaagcgggggtggagcttttgcagtcattcccgtgaatgaaaagggtcgactgcctgaacaaattcctctataccgaggtcatactgccccagttttggacacagattggaatcctttcaacgatcatgttattgcatcgggttctgatgatggcaaggtttttatttggcaggtaccacatgaatttacgctgtacagtgaaaatgaagaaccaacacatattgcaccagtcagcagattaagtggccactcaagaaaagtgggacaggttctttttaatcctgcagctgacaatattttggcatccgcttcgggtgactacactattaaaatatggaatatcgcacaagataagatttgtcttactctgaaacataacgaggttattcaaagtctgtcatggagtgcaaatggtgccatgctagctacaacctctcgcgacaaaaagttgagggtttgggacgtacggcaagaaagacctgcccatgaaggtctggggcacagtggtgccaaaaatagtcgggttgtttggatgggagagcataatcgcctggccacaactggcttctccaaaatgagcgatcgtcaaatggccttgtgggatgttggaaacccatctgaacctatcggtggtttcacgcttctagactctatctctggtgttaacatgccattctgggatgatggaactcaatgcttgtatctcggaggtaaaggtgatggaaatatccgttactttgaatatgagaacgacaaatttgaatttctctctgaatacaaatctgctgagccccaaagaggccttgcttttgttccaaggcgtggtataaatgtacacgaaaatgaaataatgagagcttacaaaactgtcaacgattcatatatcgagcctatttctttcacggttccaagaagagcagaggtcttccatgccactgaatggcttgacggcaaggatggtctacctgcgaaaatcgatctagaaagtatttaccaaggtaatgctcctgtagaagtagcctcaggttacaagccctgcgtgcctgtttcggccccgacccctgttaaagcaaacatacctcgacaaaatgagcccatgcctgggattcaaagaatttctacgttttcttctattaatgagcagaagaacgcaatgactgctatagcttcaaagtatcaagatgatgcgggtgcatcaccggatgacgacgcctcaagttttgaggagatcaaaaaccctgtacagaaatctagttttaatacacccaaaaatttaaacaacccctcaatgactaaagccgattctcaaccagaaactattccactcgagtctgtaacagtttctcagacaaactcgcgagcaactcaatcccaaatatcaccttccacggctgaagaacatctgacaaggaaagacgctaataatgataaatcactaatgacatctctagctcaaataaaaaagttacttgaagaccaaacaatgacgataaatagtcagtcccaacaaatcgagaaactggcagatcaggttgacacgttgaagacgaaggtaagtactggaagtcaggagcaatctgatcgtatattagaattggagctcgaattgaagaccctacgctcagaaactgcggaggtttag

SEQ ID NO: 162 - DNA, 2034 bp, Golovinomyces orontii
  source 1..2034: mol_type = genomic DNA
atggaggacttaaatgggcttgactggtcatcaatcccgagtaacacgaatcaagatatggcaagcaactatctcgctatgcgacccaattcagcctcccaatatgccatcaaaattgcgcccaactctattcagaaacatggctttggaatgcctggctcgaaacctgctgttaaatcaaaacccgtggacagcttctcaaaccttgtatctcttggctctatgaaggagaacacccttacgttaaaacagcgtatgcagaaacttgaagctgaaaagagagaagaagaagctaagaataaaacacaacttgaattacagtttggcaatggaagattctgggacgagattgaatcgaaaagtctaagacaaaacaatatacgatcacctgttacatctcagaatgaaatatcgatgcaaaagtattcaaaagatctaaaagtaaggcctgtatctcctccgactgcaaatggaaagtctatcgtaggtttggggtccgacgaagatttattcgcagcattcaattcagaaaccaaagtcgatagatcaagccattaccctccgcctacagaaattaacatgagagaaaatacaccatcctcatcaactagtaaatatctagatttgagcagaccacaggcatggggatcacagagaacctcggcaagtacgcgttctaatgaagatgatgacccgttttcattgagtcaggttaagacggatattttattctcaactaaaccttctaaaaaggaagaagatttgcttggtgagcttggaaaatcagttgaagaagtaaaagtgaaaaataaaataacgccaaaatctatcctcgagcataatacaaaatctacaaacgaagatttatgggataaagcagtagcagatctcatcgatatgggattttcagaagagcaagcacgacgtggattgattgagagtggctcggaccttaatatacaagttgctgaactaagatataattcccgacccactagcggagatttagatatttcgaagtctgcatctattgtcggtaacaacattgccaagactgctaactcattatggaggatatcacaaaaaaaagtacagaaggttgtatctgaatttaaacaagattcgggttcagagcctaagcaacccaagtggatgcaagaagcttcccattatggttctacggaagatattcttgagactaacaggcgaaaaatcgaacaacaacatcgatctatcactgatgaagccctgttgctggaagtgtgcgatcaccgtcatcaggctaaaacaaaagcttttgagaataaaaaatcaaatcagaaatcatcgcaagatcaatcctctatcctgtctaaaaagacttccaagattaatggccatgactctggacgaaatcggtctgactttcaagataatagagattggggacaaccaggaacttctcatttcaaacgtggtgattatgccttggcttattcctcatacagctcttctctcacgcctcttccagaatcgcacccagtcaatattgttcttctctgcaatcgggctcttacgtctttaaaaaatggggtgccaaaatctgctgtctctgacgctgatagggctctcgaattaatcgggttgtcacgtggtgaaggtgaaactattgatttgggacctggagaaggaggtggtatcaaagaaatgaaatcatattacggtaaagctttgttgcgaaaggccgaagcactagagcagatggaacgctggaaagatgctggagatgtctggaaaatctgtgtggaacagggtgtcggaggctcaacgctatcaccaactcctctaaaaaataagataactaagccatcaaaaaaccatgatccaattgtaattagcggggattccgctgcagtcaggagacttcgggaatcgaatgaaaaagcagagatggctgaaaaccagagactatcactgactgataaagtcgattccaaagttgcactttggagagatggaaagagggacaatctccgagctctaattgtagtctag

SEQ ID NO: 163 - DNA, 2283 bp, Golovinomyces orontii
  source 1..2283: mol_type = genomic DNA
atgcagagaagactagagatacatgttgtacctgattcttccaaggtctcacaaatgccacagaatttgtctgtctcacctatgatccaaccattttcattatcaggctctttacaatcatcactttctactccagaccatatagaacccaagcgaacatcctatcagtcaccagttaaaactccgataagacctttcccttctaaaatcgacacaaaccggccgcggcttttctttcttccagacccgctctctgagattgggttaattgtagcacaacaacctatttccgaaagaggtgagcaagacaaaagtacggttacattatctcatctcgaccctgctgaggagatgatatatgtctcatgtcgagatgataatctctcaaacaatgcagctcaatctctaatgttggccttaacgtggaatttaaagacattaacgtatacagtatgggtaatgatctactccgcagaaaaatcgaatgtcaatgatagagcaaagttaataggaagagaaatttctaaacgtaggagctcctatacaccaaccggaactacgactcctttgatatctagacagcaaaatttaagagactcaaactatggaagtcagcctactaatctaagaaaaatcttaagattgacggatctcgagataaatcggttatcacctagacgaagatctcgtcgtgtaagttctatgctagccagagctgatttctccaactctcacgagcgttctaccttctccgatctctcaacaaatcaacaacatgttatcaatcgacgcggtgagtctctcgggagccaaaatgcaagagctagtataggaacttttgaaacctcaactagcagtgcatttccctcgatatctcaaacaaaccaaagcatcactggacttaatgagataaatgataataatgctgccactagacctcaaattggtgaagatcttgaaggattagagtcaataggaatcgatgacggagattttagtactttgaagcacgaaatagttttaactaagattggtattatctcgcctgaatatgcaacgtttagaagttctattcagacaaagccgactcttaatcaacgcaaggtttttacggtggcgccgcccttgtgcgcttctgacgatgtacaggagaattcttgtattatttgtatccttgatcctaatgaaaagaaacttattactgtaaatttaaatatcaaggcctcggagcaaaaaagtgaactcgcaaaatcggaaaatctaaaatctaagaaagaggcaactacagtgtcacttggctcaattctactagtagataatgtaatagatgcctgccgaattgatgatggttcagtttctcgcatccttgtcctgacggagactaatgatggttgtggagagttaactttgcaagctccctggagcagtataatgaagattactctcccgactcaattttcgaccgctagggcatataacataagtcctcgaagcagtggtcaaaagccagacaatggtcttataacaccgcgtgcttttcttggtttgagaaactcgcgaccttcaggacaggtcggcttgcttgatgacgaagggaacattcaccagattcgcattctgttgcagcccaaaattctcatgtgtctaagattattgacagatatcgatactggctcttttaatcaagatgataatattttagtctgttggtggaatgtgatggtgtggcttcgatcagtgccaattgatgcttcagacccagagtggacatccctcattatcactttactaggggcggcttttggtgttgatcacttagagaaattctcacaggactcaaccgacacgaaaaaaaaaaaaaatcaaaaggatgatttgaataaaaaatctagggatcttgttaatagctggggactaatgttaagagaagaaacgaagggtggaagctcctttccttcttggatggaaaatactgggtgggcctggctcagtggtagagttgatttcgattctaaagtcagtgaaacagaatcatcagtttcaatatttgaagaaaatagtcagcaaagcgaatcttttatccaggaacatgtgaaatttacccgaaaatacctagaaacttttcagggaaaaaattcgatttttcagtatatatctacttggaataagaacagtttagagctccgtcaaaatgctctacgggacttgcttatcgggcttcatctgctacgagaggagcaaaagcttgatgtgatggtttgtgattcttatagcacaggacgt

SEQ ID NO: 164 - DNA, 2761 bp, Golovinomyces orontii
  source 1..2761: mol_type = genomic DNA
atgataattgtcaggtctctaagacacactaacacaaggctgaatgacataatgggacctgacggcgagcattatacaagacaaagcggtcatccagatgcagatgacacggatcataatgtctaggaactaaaatattaaagctgattacacagaagttcctaaaaatcggattactggtattagtagtgaagataaatggaatttgcaattgtcaatgactctggctaatcgacctttagtcgctactcatcaagttcaaataactgctcctgtcttctagcatcatgttgacctcaaatcttctttctcgtactctacctaaaatatctccaaaccgttccatttacaaggagcttcgaaaagagcagacaggcaacttgaaatggataaatcaatctcccggatactttatagaggaaggcgatgacgatgatgtacctgcttctctattggtagaagagcatgagattacaggccctacctctatctctgcagaacctaagctacggaacctcccaaaaaccttttctccgaaaccatcaacattcgcagagttacataatgagatgtttagaaaatcttcactcagtcgacgaagctttggccgggtaactggaaatgctagagaaaaagcgctatggcggtggattaatataacaaatttagataatttcataagagatgtttatgattactacaccggtgctgggatatggtgtattttgcttgaacgaaccatcagacttgtacaagttgtatttgttgccgtatttactaccttcctgactcaatgtgtttattttcataaaattccgattagcaagaatctatctgagattttggttccgcaatgcactaagaagatttctggcatctccaactttgccatttggctttttacattgcatattctttggagaatatatcaatactccggatatcccactgatatgcagacaatttcatggcaagatgtagttgctcgcattatggctctaagggatgcgaatcctgttacggccgagcagatatctccatcaaaccgaagatttctaggaagtcaatcaaaacaacgacttgatgcacacgatatagcaaatagactcatgcgtagagaaaactacctgattgcactttttaataaagatatcctggacttgacattgccaattccaatttttaaaggccgtcaacttttttcaagaacacttctttggaatatagatcaatgtgtcatggatcttgtatttaatgataaaggacaagtgcgacaagcggttttaaaagattcccaccgaagacaattaagtaaagctctgcgacaccgattcatgtttgctggcttcatgaatgcttgtctagcaccgattatagtcatctatttagtaactatgtacttcttacgatactttaatgagtatcaaaagaaccctgctgccgttggatcacgtcaatacacgcctctcgcaatgtggaaatttcgagaattcaatgaattgcagcacttttttgatagacgtgtaaacatgtacttggatcaatttcctaaggttaaagtaacgcaactagctcgaatattatctttttttgctggatctatagtctcagttctcgcagtagtcactctatgggacccagaaatgcttaccaactttgagctaacgccagatagacctgtggttttttatattggaatttttggtgctttctgggctctcaccaacggaatgattcctgaggagaacttagtttttgaaccagagtacgctctgcggaatgttattgactacactcattatattcctgatcattggcaaatcgtctccacagcaacgatgttgtataaactgaaaatattgatatttatagaagaaatttttagtataatcattacgccattcatcttatggttcagtctccctaaatgcagtgatcagatcacagatttctttcgcgaattcactgtacacgttgatggagttggctatgttgttcgcgacggtagaaggttaccggatcagacttcaggaagtgtagacgttcgggatgattactatgctactaagcatggtcacatccctcctgggacgcgccaaaaatattaccccccacctccctttcctggattaatgtcgcctggatatggcaaaaaaatacttagaagccgcacaacaagggccacatctgcaagcaatcatgaagcttctccattacaatctattcttcttgatcctgagcatcaaccttcaaattcaggattcagagggataaactcctattttcgattcaagtcaaaccctaatattattgaggagccagttgaaaatgatggaaatgtagaacctgggagacctggtgaatctcgatggcaagtttcccctccaagaaccgtagataatgaatcagaagatgaggattcgaacaaggtaggtgtccttgatcctggaggaggcgtcaatatttgatgttaatatgtttgttggagttctataagatcttaaatttgggggcgtaatttggaataggaagatatgacgaatgaaggacctcttcacatacgaaagctcatcatcatcattgataagatattaggcaaaacagaactctagcgtttgtctttgtgttaaaaatttccaggtttaactactttgaaattaataatccagaaatttacatgtcacgagcaaccactttggtagataattgatccctttttataaagattatgactgaatttcaaattattttaatcatttcg

SEQ ID NO: 165 - DNA, 2301 bp, Golovinomyces orontii
  source 1..2301: mol_type = genomic DNA
atgtctacggctactcgctcagattattacatgaatgtctactatacctcatccgaggaggcaacagaagcagagaaagcttttgttttaagaaatgggtattgtttaataatccgacgcaccaaatccgcaggaaacaggaaaggtggtctgagaaaaagaaggattcttgtatgcgtccatagtggcaaggccaatagtgaatcacggataagagatacttcgatttcgctatgtagagaaaatgaaagtggcgatatttggtcgtccaaaatagtggtttgggaacataatcatgagcctacagaaaatgtagctgcatatccaagtgcaagaaccctgacagaaggcgaaatggaaactgttgatagattaagcagcgttggaacaaggcttctcggacaccaaggagcaagccaagcattgagccgtttactcgaagtggaaatgggatgggaaatattcgaattaaacggagctggagcgctgatagaacggatagtagggctaattgtaacgcatcccttagttaatactttgcgtggggcaatttcagtattagttgctgttgtctgccattctcagagctccagggactttgtccaagcttcagacaaatttggctttcgcgctctagagccagctatagctgtatatcctcaattcttcgagatggtagtttcacagctcaactctgctgatcatcttctttgtgcaaattcattaatgcttctaaacgcattgatacgagatgcagtctcaagaaaagaatttagtgaagagaaaactggaaaatcgaatgtagcgggagaagaatggcgacaacttatttcaaaattagaagaaattgggattgtacaggctgcatataacttgatgcagagctcttctctacaagacatggcacatccacttttagaattccagacagtgtcgaaactattattgaaaaaacgaagagatatagagattgatcttcagaacgtagaacaccaagccatgctcgaaaaagtatttctgtcaagtcaagacgacgaaggtgatatgcagagcaaatattttggaaattttgaaaaacaaatcggcaaggaacaggattctgagaagtggcgaagaataggctttcagactgaaaatcccgttttagattttgaacacaccggctttctcggaatgatggatttggtgcacttcgtaactaacgatagagataactttcagaaattcatcaaggaacaatatacaaggcctgttgagaaaagatgtcccattgcaagagcaagcctttcagtgactgaaatcctctacaaacaatttgaaatcgatcggtcagacctagaggatccgaagacttacctaactcttgatgcaccatttgtcttgcagtggtcgcgcatacacgtaaaagctctaaattctttcatccacctgtggaagcaagtaaaagcagaccgagaagaatttgtaaaagttgccgagctcttacacattttagtagaaaaagttcttgcggaggctctaaggacgaaggatattcaggagattgaggaagagctgagcgaatttgactaccataaattacgagagtttcaaatagatatgatggatacggcatttgaagatgagtggggccagcacttgagtcagatcagaggtgaactacgagatgaagcccttcagttcctaaaagagcaaagaattaggatattactccaagggagctggttcccccttagcgaggagaatgataatgtgaaagatgctcagaatgagcagacctgtccacccatgtggcgatatgtcaaactttctcataatcgtcgatatttacattacaatgatttcgaaactcgagccgtaaaagatccagtccttgataacctaaacgaaaaaatcgatttgagaactgtcagctccgtagtctccaatgtctcagaaactagtaacaaaagctctggtatctctatactgaccactgaaataaacactcgtccttcagaaacacaacccatcttgacgcgaattacaatcaaaggttatatcaataccattgacggcaaaccacaagactcagatctttcgaatgcagcgacaactgaaaagcctcttttgattcttctgtcagctagccaaattccgatcacatctgagactaatgaattaatcgatttcgtttgtgattacggtctgaaaattaaacttttaaatgtgcgcatggaggattttgtggatccgccagatgatgctggagtcataccgagcagagaaggcttggatgatgattacttttatgatatttaa

SEQ ID NO: 166 - DNA, 1230 bp, Golovinomyces orontii
  source 1..1230: mol_type = genomic DNA
atggacgaacgaaacaacgaagaactcattcagcaatttagagatctgacaggcatcactcgagtggaagctatccagtacctgactgcaagccaatgggatttgagcaatgctgtaactgaatatttcactattcaagaagaaggagcagaagagggcgatgtcgagggaaataagacagtacaagaaaccaaaccatataccgggccaagaacacttgatggtagaccagcaccagaatctacttcaacaattggctctagctctcgactatcagcaacaaaatctaagaaatcaggtattgcaaccttaggctcaataagccaaagtcaaccctcaagagataattttgacggctctgacgacgaggatctaaatcatggcaaagagccaagagatctttttgcaggcggcgaaaagtcaggtctagcagtacaagaccccgccgaacatcaaaaccatccaaaaaaggtggttcgagacattctaaagatggcaaaagctaatgctgcaagactaggcggagaaggaggtgaaccttcagctgctacaccatctttttttcgcgggaatggacagactcttggtggtgatgataccccttctcgaattattcccaacactgaacagccccctccagaagtaaaggcagcacgggctagaactttacatctttgggaagatggattcagtattgaagacggtcccttacgtcgatttgatgatcctcagaacgctgctgatcttcaaatgatcaggcaaggccgggcccctgtccacttaatgggcgtccgtgaaaatgaacatatagatgttcaacttatcaatcatgatgagaactacaaggctcctcctaaagtttataagccatttagtggaactgcgaaccgtttaggtagccctataccaggctctacagtcaagcctcagactcccatttctgtagaaacagaaacgtctatctctgatccaaaacttgattcatcccaacctgtgattaaaattagaatacagcttgctgatggaactcgattacccgctcagttcaatccaactcacaccattggtgacatttacgagtttattgaaagagcatctcctacaagcaactctagaccatgggttctcgctacaacttttccaacgaaaaatcacaccgaaaaaagtaagacattagaagaaattcccgaactcaaaaggggtggtactgccgttcagaaaaccatttaa

SEQ ID NO: 167 - DNA, 777 bp, Golovinomyces orontii
  source 1..777: mol_type = genomic DNA
atgcttctaactaagattcacaccgcaccagaactagactcatttacagcactcgaagatcatcaatcaaagactcccgacaaattttatgaaacgaaacctgtcctatactttcatgacaataatgccagagctcttatcgtcaaaagtcagcttgtcaaattacccatctgtgaattaaattcttcggaaaatgaacctgaatcaagcccaaaaatagctaatgtcgaagtgtttgtcaattcccagaaattgattatatttaaccctgtcgaatgcattggctacgctattccctactcagcgattactcttcatgctatccagagattaaaagatccaatagattcatatctggaaatacaaggactctacatgcaaataaatatatcagattgcagtggtgacgaacaacaagatgaagattcgacctatgtagatctaactctcataccatcactcaactctgataccataactaaaccaagaatccaaacactctacgaggcggtctctgcctgttccgacttaaatcctgacttgaatccggaagacgatgggataactgaagatgtaggtgaagaatctaggataatatttgaaggcactgatggtcttcctggtgttttcaacggcggatcagatggcaacctcccaccgccgtttcctggtagtgggggatggataacagctgagaatatgtctcaatttttagacgaagaaggtaattggattgggaaaagcgataacggtgaggattcaatggttatcggataa

SEQ ID NO: 168 - DNA, 1917 bp, Golovinomyces orontii
  source 1..1917: mol_type = genomic DNA
atgcctgaagtggtggatgattcgcccaatcctggcttaggctccccggcgccaatactgcatgataacgtcacatatcagacaccgttagctcaaagatcacgagctaagtgcgaaattactgattcaacgcagactgattccccgcttaaactatccacccaagatctagatagcgctcgattagaatatctgtcaatatcgcttcgaaaccacgaatctcgaggacacgaagagattacaatcttagaagaaaatgatggacgaacatcacggattgataaaagccggagagggactgttggtaatactgacatacgctctacctcacctccaaattctgtaaaagcattcgctgatgcccgtcgtcgcgagcgggagttgtcatgctcagatccaagcacaaacaaggcaatttccgattctcgacgcctcgatgaatttgatgtaaacagagcagtttccagagcattatcacgagatagcaggcgcagccatcgcagcagacgcagtaaaagatatgtaacggaaaaagaggacgaggaggatggtgctactagctccgatgagtcaagtgagttggctaaagatgacgtttgttttccgttgaatccagaaggaaacaaggattcacttcagattgactttggaattctcgaaaacttcattgctgacgctgagtgccgcgaaaaaacgcccacagtaccacaaaatcagccgcgcattttcgatgatctacgtcaagaccaaagcgataatcaagtacacttcactcagtcaggggatttcttagacatacctcctccatcatctattggcttaagtaggaaatcgtctgtcaacgttagtttaaagaattctgcaggtgaacaagaacgccactttgaaaaccgctttgaattcttctcttcgttgggtgaatctacaattcatgcttccgaatttggcgatctcgttcttcctggcgatgactttcgaaccttgttcactctgtccaaagaagatgatttgggtggtgtctggtggctaaacatgaataatccaaataatcttgaaatcagaaccatatgtacagcattcagcgttcacccattgacaatggaagacatagttacacaggaagctcacgagaagattgaattattcccctcttactatttgcttgttgatggtggtcaacagtacgtgccattcaatatttatgtcatcgtttttcgcgaaggaacgctcagctttagcttttatccaaatccccatgctacacacgtacgaaaaagaattacaatgcttaaggattacgttgctctaagttcggactggatctgttatgcgctaatcgataatattgtggattcctttgcaccaataatttcaaaaattgagtctgagactgatgatattgaggatgaggtattcattgcgcgcaatgatgatatgcacacgtttcttcgaaagatcggtatggtgagaaaaaatgtcatgggtctcatgaagctgctcggtggaaaagcagatgtcctgaggggatttaccaagcgatgcaacgccgattataaagtaacaccacgaatggatatcgggctttatcttggtgatattcaggaccatgttgtcactatgatggccagcttagctcattttgaaaaaatgctttcccgatcacacagcaattatctggcacagctctcgatagataacattacccaaggaaaccacgccaacaaagttctcagcaagataactcttctagcatcaattcttgttcctttgaacttagtctgcggtatgtttggtatgaacgtaaaagttccctggagagatgctgatagcttgggtcctttctttgggatactgggtctcttatcaattcttacaatcatttctttatatgcggctagacggttaaggtttatttaa

SEQ ID NO: 169 - DNA, 588 bp, Golovinomyces orontii
  source 1..588: mol_type = genomic DNA
atggatatggatatgaatatgagcacaggaatgaatgcaagtccaataatcggaggcaacgaagtccattcacatccaatggatatgggaagggatatgtcgatgactttttttaatggcatgacaactaaactctatacctcgacgtgggcaccaaaaagtttaggcacttatatagcgacttgtttatttctcatcgctttatccagcatatctaggtttctattagccgccaagttatggctagaaacaacttggatgaacgctgagctcaatcgaaaatatgttacggctgctggaaaagtaccaatctcagaacagatttcaatgaagtctgaagctcggcaaatggtactatctggaaatggttttgaagaagatgtgatagtcgttcaaaagaaaggattccgtgtacggccctggagtattactgtggatccaatccgagcgctgatagacaccacaattatggcagtgggattattaataatgctggccgttatgacaatgaatattgggtattttatatcggttttgataggcacatttattggcagcctagttgtcgggcgttattctcctgaataa

SEQ ID NO: 170 - DNA, 2094 bp, Golovinomyces orontii
  source 1..2094: mol_type = genomic DNA
atgtggagtcgtcaaaaacttgactctgaatcaaacctgacgaaattaaggccaacgtgcttgttatatcactcatctagctaccaggatgctcatttatggggataccttctaaattatcgatatcaaagttatggactcgccggtgtgagaatgttctggagagctattctcgataaaaatatagttttgcctacgactggtgcactggcaaaagatatctggaccacttttctgaaactaggtttcagtgatgacagggttctgaaacagatctgtgattacgcagataaattattagaacgtgagggaaagcgttggttgctactatatgatagtatagtagaacatttccttgtgaggaagtctggtaaaaaagctctcatttggcatgagcgactgtttcaacttcatcctcctggtgctgctcgctttcgtacattcattcgcgaagttgttcatcagaatggtgatatttctactttaaagactatttatgaacgcagtccctaccgaaatgcctactctggtgttattacctcatgttttaagcgtggtcagattaaggatgccgtaaactggcatttttttttcttaaagaatcatgattttccttccagtctcagaattgtagagcctttgatcaaacatctttcaaaatatgacaattcaaagtataacatggtaacgaagagtttagttgaagcaaatgtttttccgaaaccagaaacaaaagatgctcctaaagattacacaaaaatatcaggagaactgattaacattattcatggcaaaacttttggtatttctgtcaaaaaatacaatgatgaattgggtgctcgatggtttgctacagagtgggtatctttagaaaccgctatgaaaactgtgttagctctaggggttcaggaaatcggtccactttcgctacaagccatagctttgcgtgatccaactgttgagtccgttaatcataggattaatcaacttcgcgaacttggtatttcgataggaaactcgatattttctaaagctgttgaacatttttgtcgaaatcaaagtgctgaatttcttcatgatcttcttcatagtgaccagcatccagatcagcttgaagaccacaagcttcaggaagaactactccatgtttatgctaggtccaacaactggccggaattttatcgaacattagaaattaaatcactttctagtaaaaatccagatgtctatagaaaaaatatgatggtcaaggtgttattcttgaatgagagagcctccgatgccaaaaatattctagatcaaatgcaaaatgaaggaacccctataaaaccaactactatctcatgtatgaccttccatgtgctgaaacccaggcgccggagccatggcccttcttgtgatattggagatttgaagttagctgtcaaatttcttcgtgaaatgatgtgcattggtaatttcgtctctccgtaccactggcgtgaaatcatcaagagactcggtatgcttggtagatttgattacctcgagagcgtctctctcactctcgcacaactgtatttatcaagtcaagtgaaagctaaagcggagcaagtttcatcagagatacaaccaaatcatcctagacatcccactcacaatatctttggtaacagtttccagagggctgtcgtggaatggggctttatccatccactgcgtttcttctacaaagaaaattttgttgaaacagagagaaaggaaagttctcaacttccagacatcacgtttggcatcaatcttctcaaaaaacttcaggaacttggtgttttcattgatggtaacattgtgagtcgagcgattatgaatcgactagtgacgtacttcagtccagaaatctcgacaaagagatataacagggaagcccagttagcactcaagggacgttttatcgaagtagttcaacaattggaaattgcactcgatcaaaattactttttagacatcgatgactttccgacttatttaaaacagcaaatggatcccaaaactcgaagattaaaaaaagctcaaattaaatggcgcaataaagctaagatgaagggatatttataa

SEQ ID NO: 171 - DNA, 1041 bp, Golovinomyces orontii
  source 1..1041: mol_type = genomic DNA
atggggtggttctggggatcctctaatgatgataaaggaactgataatgaccctttaagaaacctagaaccaggtcttcgagattttttaaaaaaggaatctcccatcaaatataattcctcacaaccacagtcttcacaaccacagccttcacaaccacaaccgtcatcttcattgtcacattccacctcttcagtaacttcttctaacgagactagtgattcatcaagctctaaagaaatagattcgaacaaaaagacacttccacttgtattcaaggatggacgatacagtcacctctgggaatcctaccaatcaccagaagttgtggataattacatgaaatcagaccaggaaaaaattgatgaaattctagaaggatttaaaataagaagagctgaaattggtaaggctgctttggaaaattgtgtccttgagcaagaggcgcttagtgattgttggaccagtggaagtgcaaaatctcgattgacgctgtgccgtgaagagaataaagctttcaatcgatgtcatactatgcaatctaaatttctcaaggcactcggctatctctcatcttttgatcggcccgttgaagttgatgaagaaattcaaatgcgagctgatacattgtatcatcgcatgttagatgaagaaaaaagaatagaagcggctagagctgaaggaaaaccaacacctaaattctctcctctcctatctcaggatatatccagtccccccctgaaacccgagactgaagcggcacaaaaagatgtcgaccaggcttcacgtcttccctcggatcttaaagaatcggttcgcaagcagctcaaagaaagattggaaaaactaactcccatcgaaaaagagattgaagagcaagctattagagctgagattagagccggcgagagtttgggtggaaatttgtccgaaatctatgaaaaacaagagcttgataggcaagtaagaaaagaacaaggaaaagaaactatcggagataaggttatttcagtctttggctttggctcaagcaaaaaataa

SEQ ID NO: 172 - DNA, 654 bp, Golovinomyces orontii
  source 1..654: mol_type = genomic DNA
aaattgcgtagtgcggttgtggaaataaataactcttcaaatatgatttgtagacgtttggataatacctgttattctatacttgaaaagctttcttccatacagagtatgctcatgagtcttaaaaaactttctacaacgacccggcaatgtaatgtcaagtttgcatccgactaccgtactttagcccatgagtcttacaagcaacttgactctttagatagctctaaagaccaggcaaaacgtttgagtaaactgatgaagagagttgacaacagtcgtcaaaagtttctgtgtcttggggaaagagttaaaactgtgcgcgagagagtcgagaaatgggagtcaagcgaacgtgaatggaaaagtaagatcggaaaaagactcaagatattatggagttgttcgggaggagtgatggctcttgtgctctttgtatatgtcttgtcttggtggatagctggaaggaccgatgcaaaagaggtagaatatacacaggtaactcaaaccgtcggaactacgttgtttaaaacaacttctgaaggacttggcactccaaaagaccaaacaacggttttggataggatgaaagaccattacgcgattaggaatacaaatagtaatgaaagacaacggaagaatgatgaattatga

SEQ ID NO: 173 - DNA, 1089 bp, Golovinomyces orontii
  source 1..1089: mol_type = genomic DNA
atggcaaagtcagcaggaatctctcaaaatctacgaggctatgccttcgtcccccttgcaatctccagtgaacaacgagatagtcacgactggtcttcgtatacaaaatccaaaaatacaagaagacggcggaaatttgtctctagatttttacctgtgcctgatgaaactcgttacacaagtagccaggaggaatacgaagaaagtgaaagtgatgaagatcatatcctggctggttcggatgagcaaactgtttataactctttctctgctctttctccatatgagacagattcagattcagatcgatggaagagagtcaagactcttccggtcggaggtacagagactagagctttgctcgacccacaacatgatttattctcacaacaatccccaaataaatgtcatattagtcctgaaagctatctatcacccaggtctactcatgggcagtatccacatgtcgctcgtaatgtgttccaacagcagacatatcgtcgccctacggatcatgacgcggctctgcgggcttctctaactaccttgctctctatcggtgcagcagcagcaagaggactcccaaaaagggaattgtcttctggccgagataatttatctggaagaagccaagaaaataatgaatcaattggcttacgatttatgtcagagtcagagcttttgtcatcatcgtcacgtcagccatcagttccatccgtgaagcccaccaatgtaatctcttcttataataccttgattgaaaaaaaaaatccgaagcgaagttcgaatgaaaatataaaagaaatcaagagccaatcggcatcggtatcacaagaaaacacaaactctccaacttttttgacgtgggcagtatcagcaggtgtcttggtaatcatgagtgtttttggatttggtgccggttacctcattggtagagatgctggtagacaagagatcatggctgggcttaacggatccgttcttagtaacgatagtgtttgcagtagagaagttattggtagcagctcgactggcttcaagaacttcaagtggagttttggtacaggttctcagggaattattacatga

SEQ ID NO: 174 - DNA, 1521 bp, Golovinomyces orontii
  source 1..1521: mol_type = genomic DNA
atggagattgttatttgttattgtcttaattgcaagtctgaacttgggcgatttagaaatgcttggaatggtattggcaatacttacttcagtccgatctgcaatcttgtcacgagtactgggcttgaaactacgggcgatgtctacgaggcagcacacggatcatcaattcgatttagtttactaagagatgtagtctgtgcaaggtgcggggtggttttaggacttcgctgtgatgcagcgcctgaaaaccatatattaaagcaggaccagttaatcctgagacttaaggaaatgttaatcatttctgaaagatctggtcaatcggtcaatgcttcagttctgaaaacaatatctctaaaggaagatgaaaacaccgatacatctacccttcctcgaatagctccagtgcattcattttctcatcctcatgatccctccattgactctaacgatcgagaatatgacgaaactggtgatgaagtcctagggaaacgcgaagctcataaactacctcagattagacaatcgccgcagtttgtcactgtacaggagatcaaatgtctctcagtcgaagtagaaaactttaagaattgggcacaagatctcatccttaatcagcagaaagatattgaacgactttctggaactatatctggaattgaaaaggagatgcagtctatcaaaaatcttatgcaagaagtcagaaatgaatctaaaacttgtcatcggaataaagaatgcgctaaagagttattggatttgataaatgagattaagcaagttaatgctagattagaccagaagaaggatgctccagattggaccaaaactgcaggtcttctcgcaagaaacctaaaaactgttgccagcgatgtgaaaaacttgtctatcaaggctgaagaagtgaacgggttgaaagtaaatttgcaggaactagcaggacgacttcattttatagaagtagagcataaagatctagattgcccaagattcctgcaacgatcaataagagctcatgatcttgtcgaaaacaacggtcagaagcaagatctgagttttggcccggttcagcttaagatcaaagaagaatgcttgggtgaattacccaccaaggatgaccagagaactgagataatcaatctagtattaccaaagcctgactcccaacctcatggtaagattcatgatgagagtactgctcagggtcatattcctgcgcgaaagaagtattctactcaccgtacaccacaagttctgatccgaggatcaaacatgaaagcatcgctaaatgaagtatcaaaaaaatcagatttgttgaaactaggggaagagaaaattgacttagcagaatatcaatcaatgaccagaaccgattttttgagaaaggataagcaaagacggagatcagagtctaaccttcgaggctctacgaaaaaggcttatacgattacccaggagaaagaagtaaaaaacatagaaatcttagacactaatcaatttgagacaattaggctctga

SEQ ID NO: 175 - DNA, 2715 bp, Golovinomyces orontii
  source 1..2715: mol_type = genomic DNA
atggcgtctatgaacggtgttctaagtcctcctccgatcatagatacggtagcctcctcgatgaacttgtcctcaaaacgaaagcgtgaggacaacgttttagattccgaaaatgtagcaccaccacaaatgtcacttgcagaatcgcaggccctcattatagatttgatagatgtcttgaaagcagatgatacaacgccgtcaattttgacgcgctctatccccgatcttcctcgttcgtgtggccatgatcccaagcgacctaaagctgcagaagctggtgtatcgcaaacaactatattataccgaatctcttcgaattattacctaagtgtcgatgaagttcttagtgatatcgatgttgctgtaaatgaaatcacagataaattagagctctctaacgctgtcatacaaaaccagtgcactgcaatctctcgtcctccttcagaattatcgataaagatgacggcttttatccaaagagctcatgatattgtgaaaagagggaaggcttcttgggagaggtgtcgcatgtccatcacaaatggaacatctcacagctatcctcgtatctcagcgcatgaggattattcacaacataaatccagctctcaggttaatagactagctctgacagtatatggaaatgcgccgacgccaaagcagttattttccagtcttcaacagtcaacgaaagtaaatggtagtaaagaagaaatcatcgtaccaattcgagaagttggattaccaaatggtattgcaacaactcggataataacaatgcatcctcctagtctaacagatggcaaaaaacgccctccaactatgggcgagatcttccctactcctcctaatgtaactccaatgattccaccgaagccatctacaatagcaaccaccaaatcatcaactgtcggatggtaccatccatcatctataacaagtgcctcgaagtccttaagttactttaatcaggccatatcttcaggaaaatggattgactacggcaaaagtaacagctctggacgagctgataagataaaaaatagagatagaacattggatcttggaattagtaaaattctttccgtagaatcagaagcggagaggttggaaaatctttttcgaagcgcatactcaagttttgctccgacgaaagataatgcagcagcaattgcccccaccgggtgtctagaacgcatgtggtggcgcgagcttggtgagaagtatttcaatagtcttgtccaaaattccaaggatacaatagaaaaagaagtcgctgaatcaccgagcgagaaagagataaataatgacttagaaaagtttgaaagaacccttaaagaattggagaatgatgctatagatcccaatcttgattcgcccccgtgtaaaacagagagatctattctagaaaaagaaattgatgaggttttgaatgaaatttccgaattattagaaacattaacttcttatcagcgcatacgacattcatcattgagtacaacaaatcgttcaactggcatatactcgtcacccgatttaaattctcttggcaccccattaaagccaaatgaatcagaactcgcaacatacgaaatactcaagtcgcaattggccctaatgatcgctagcttgccaccttacgccgtcgcaaagataaactctgatagactggaagaattaagcattagcacaaagatagaagttctactgaatgattacaagggtgtgatggaagaagacgaatcctcctcgaggacaactaaaatggccattccagtaaactcttctttgtcttcgccgagagcttccacactatctactcatcgaggtagtagtgggagcaataacccaatctcgcactatggaaaccaattcaactcctcgcagtctcgcggctcaacagcgcagtactataattcagttcaaaccccgattcgtcctcctacctctggcatccaacgatcacctgccactatcccggcaccatatcaaacccaacgagcatcatctacaggtctatatcgtccaggtacctatggaatgtcgtcatattcacaccaagctcctagatcaatccaacagccgtatacttcatcaggacaacatgtctcatattcaccgacaaccaaaacccagggaaatttgaattcgtcaggtcagggttacccccatcagcgcgggactcaaccggttacacagtcagcaatcagcagcagatactcaagtcaatcatcatatcaaactcaaactcaagctcaagctcaaacattgtcaccaccaactaacgttgaatataaccgacttagcaacaattatcaaatccaacgccagagttcccctcagaagccgatttatagttctcagatacaagctaaccagactactccaatatcttcagtagcgcagagttcacaaccctatacatccagctcaacgacccagtcaagtctagttaacggctcatcgtcacaaccgtcacagacttcatacattcagcaagcgacaaccttgggggcacttggaaatacacagggatttagcacttttatgagtgatgaacagcaacagacattgatacaacgccaacaggcctctatatcaagtcagcagaaagtaactctggagaataccaagaatgttgtacagacatctcgcattgagtctccatcgaaaagcgccagtgtatcaaatgcggttcccgcaacttactga

SEQ ID NO: 176 - DNA, 549 bp, Golovinomyces orontii
  source 1..549: mol_type = genomic DNA
atgcacgataaccattctcatccactccttgcacaagtgcctttgatggtatctccgttcgtatctctgccagctgcaacaacactaccatctacctacagaaagctaccatcaactctcccgccggcttctacaggaattctcgagagccacgaaaaaagtaaatacgttatttcgacttcgggacacaccgctcatccagacgatatcttagcttcatgtgaagctctacaagcgtacatacagaaagctcaagatgctgccgacgaagagcttaagtcatgggagagtgatatcgctgctaaagaattggcggaaaagagacgaattgctcccggctggctagatagtgatgcgcgtatcttgcaacctgaaaagcctaaacaaggcggagttttaattgagtctcatatggatgactcttgtgccaatatatcggtgcttcagttgatgcaatcagaaatatcaactaaagatgctgaccatctcgatcttgatcgtgcttttggtagtcttgaaattaataatcaagagaataatagaaaataa

SEQ ID NO: 177 - DNA, 1407 bp, Golovinomyces orontii
  source 1..1407: mol_type = genomic DNA
atgtcagaacaagagtcacgacgtccaagcctcacatatcgtatagcccatgttttacggcctaaaaagtctaaacatccactgcccaattccgagccaaatttcccattagaacagaccaaatctctacaggataaacgacttgatcatggtggtacatacaaaaaaaaggccgacgttgatctttgcgagcaaactggagagcggcgagatgatactgccatgctccacggattatctcattatggctcctttgattctcttgactcaaattctagagctgatttagaagctcatcgtccgcccggtgaacgcgatatagaaaagctatccagtgaaatctggagacagatcaccaaatatttatcatgttgtgatatgatctgtcttgcaacttctagtaagactcttttacgtcggacggataagaaatattggtatgaattaaaacgacgagagaatcaggaagaaaagataagatatcttatgactatgaacggtaaatatccagatcaccttttgtgcttctcttgcgcggtttatcatcgtcggactaagattggaaatgagtctctcaaatctgctatggttttaaatcctctctacaactgtgatggttatagaaaaactggatatgtacagcctaagacaagattgactcccggtcattttcttcccttcacttttgttcagcttgtcactagagctcaaaagtattctccgagacatggaattccgcttgttgatttgtgccgccgttacaaagagtatgatcgtagttggtttcacgaaactcgttatcacatttataacggacatctatttcttcgagtcacaagccggaccttcgccgctgcgggtcttccagctagtgctaagcgccacattctatattcacgagaagactactggccatacttttcatgttgtacccactggcgcgatggagaactattagatgtatgtaaatgtgcactatcacatattccagatcttccggatacacatcaaaaaggtaatatgcctaagagagagcgaacgcaaaattctagtcttattgggagtctctgttcattttgtagacccatgcgtcgttgtccaaagtgtcccacagagtacatggttgaattaaaactatcggaggatagaatggatcctcaaatgagatttaagcaaagtcttgtcgttacgcgatggagtgacctcggagatggttcatctccatcctgtatcgaatggcaggctatcaacgaagatgttgattatgattcttttgcgcatttgggtaagcgggccatatcgtgtactttcgaggccgaatctggggtaactatggctgcacaacgattaatttctacaaaccctaaaaatgagaaacgtggtgaagaaggggataactggtattaa

SEQ ID NO: 178 - DNA, 723 bp, Golovinomyces orontii
  source 1..723: mol_type = genomic DNA
atgttaagtgcaatatttctggcaatttttctattctactttcagctctccatcggcgcttctccccatccaatctcttacaaaaacactctgcacacttggagggtgagacattcatggttgaatgcgcgagccgcatcagagtgtgatttaaaaaatgtacatgttaccactgatgattcttcgccgttaccgcctccttcggaagaactagtcacgaagcatgtcgcaataggaagaggtacacaaaactacaactgcacgaaagatccctcagatctacctatttcaattggcgctttagctctcttatacgatgctagttgtattgcatctagtgatcctactacactttctcaactatcaaatgctgcactcaaactacgactcccaccagacgaaaccaaaacttttacatcttttaacctagccgtcagtggtcatcattttttccctgatcctaaaacacccgtatttgatctccgcactgcagcggctgacttgggttcggtaattcctaaaaaaaatagttctgcaccaccccctcccaactcaattgctggtcaaaataacaagggagacggtgccgtgtcgtggttaaagttggttgcaagctcgggaaacctaaaagaggtatatcgggtaaatacagcgggaggaaatccccccaaaacatgccgcggaatgcctgcaaccttctctgtgcaatattctgccgagtag

SEQ ID NO: 179 - DNA, 339 bp, Golovinomyces orontii
  source 1..339: mol_type = genomic DNA
atgcagatctcacgcatcacatttatctctttcttcatcgcccttgtcgcggctcatccaactcttaatgaacgacaaacaattaccatcccaaaaattcctgaagttccagccgtccccgaagttcccgctgttcctgaagtacaaaagcgtcaacagacgataactgttcccacgatccccacgattcctaccgtgccagatgttcctgctgacacacgaataaagctgtccacaaactcaatggctacgccaaactctatgctggacaagagacctgaagtgtggcatatccatgataaccggataactggtcggaaaatattcaaagctaaatga

SEQ ID NO: 180 - DNA, 1518 bp, Golovinomyces orontii
  source 1..1518: mol_type = genomic DNA
atgcagcctcaacgtccgattcgcagtatgcgtgcgcaaactgacgagaactgtgtacctgcagctcaaaacaaacaactcttacgttaccgacaaaagtcttctaatcaagtcgctctactacccgtaggtagactcaaggctaccgcgagacgaacagcatttggtgatgttagcaatacagttaaaacactttctaagtcacaagaagacagtggccagcttcagaataacttagacaagttcgttaagttacatgaacaaaaatccgcttcatgtataaaacaaacacaaaagtctattcctgttgctacaaataaattcaccagaataacacgttcactatccagacgtgaaaatagtgttcacaaagacactgagaagaaaaataaagtgcagacatgtcatcaagttttgaggttagagcctgtacaaaaaaattcataccaaatcaactcagaattacaaaaaaatgaacaacatttaccaactttagaagagaaaaagaaaccatatttacctcgctcttctgaaccaggagaatactgggaagatgaggaagaatcctgtgataatcaaggacatctgacgactcactcgtttcattctttcggcgataatactacgaatggaatgacaactgttctttatccgatagtaactaataaagtaaagcaagaacttgagtctgcaaggaaatatactgaaaaaacccggaccgctgaggatattggagatgaaagatgggataccagtatggttgcggagtatgccgacgagatatttacatatatgcgagaacttgaaaccaagatgcttcctgaagctcattacatggacatacaaactgagatccagtggtccatgcgttctgtcttgatggactggctaattcaggttcatcatcggttctcacttctaccagagactttgtttctctgtgtgaactatgtagatcgctttctttccagcaaaattgtctcacttgcaaagcttcaactggtcggtgcaacagcaatttttgtcgctgccaaatacgaagagatcaactgtccatcagtaaatgaaattgtatacatggttgacggtggctatactgctgatgaaattcttaaagctgaaagatttatgctcaacatgcttcagttcgaacttggatggcctgggccaatgagttttcttcgacgcataagtaaggctgatgaatatgacttagacacaaggactttggcaaagtatttcctggaggtcaccatcatggatgagcgttttgttggaagcccatcaagctttatcgcagctggctctcactgtcttgctcgcctaatgcttagaaaaggtgactggactaaacaacacgtacattactctgttattatgattaaagagtgttgtgcagctccccaaaaacatcataaagctgttttcgagaaatattctgatcgtagatacaatcgtgcggcccagtttgttttatatgaaagaaaattttcaacaaatactatttcagtatattag

SEQ ID NO: 181 - DNA, 1185 bp, Golovinomyces orontii
  source 1..1185: mol_type = genomic DNA
atgtctaatcagctaaaacatccctctttactcattccaggccccgttgagattgacgatgctgtccttcactctatgagccatcacagatcctcatcttactgcagtgagagccatgtggacatatcgtttataaaaacttttggaaaaacgttgtacatgctcaggaagctattccaatctaatgatccttactctcaaccattcgtaatttccggatctggtaccctaggatgggatctagtagccgcaaatttagcggaacgcggtgatgatgtcttagtattacacacgggttactttgcagactctttctccgattgctttgagacctacgggataaacgtcacacagcttatagctccgattggttcaagaccccaactaatagagattgaagaagaattatcaaaaaagacctacaaacttctaacagtgacccatgtcgatacctcgactggcgtattaaatgaactggagccaatttcagaaatagttcatcgggtttctcctgagacccttgtaattgttgatggagtgtgcagtgtcgggtctgaggagatcgctttcgactcctggaaactcgatggagttatcactgcaagccagaaagcaattggtgcaccggctggtctttccatctcaattttcagtggccgtgcgattcagtcatttaatgaccgacagactcctcctgggtcttactatgcatcattcaagaattggatgcctatcatgcagagctatgaagcccaagagccttcatattttgcaactccatccattcatttgatccatgcacttcacacctctttaacgcaaattctctcacgccctctttcagagcggttcactattcacagagaaatatctcaaagagtaaaagaagcagtttctggaatgggattaactcagttggctgccaatcctgaaaatcaagcaaacggaatgacagcaatatatttgccagataatattaaagcgaaagaccttttaaccaagatacttcaaaaaggagttgttcttgctggtggattacataaagaaattgctcataagtatattcgctttggtcatatgggggtgagcgtgaccaagcctgaaaggggtgatattgaacgagctatcaaagctttggagacaagtctttcagagttaggatatcgtagagagaaacagtcttag

SEQ ID NO: 182 - DNA, 1575 bp, Erysiphe necator
  source 1..1575: mol_type = genomic DNA
atgtacattgctgacattttgtcggatctactgactcaacagacgacacgatatgggtggattttcatggtcacaagtatcgcattttctataatactattggccgttgggttaaatgtattgagccagttgctgttccgtagaccctacgagccaccagttgtatttcattggtttccaataattggaagtacaatttcgtatggaattgatccatataaattttattttgattgtagagccaaatatggagacatttttacatttattctcctcgggaaaaaagtaacagtctatctgggacttcaaggtaataattttatacttaatgggaagttaaaagatgtcaacgccgaagagatttacactaatttaacaactccggtctttggaagagatgttgtatttgattgtccaaattccaaactcatggaacaaaaaaagtttatgaaaacggctcttaccattgaagcgttccattcctatgtaacaataatacaaaatgaagtagaggcatatataaacaattgcgttagctttcagggtgagagtggcacagtaaacatctcaaaagttatggcggaaatcactatatatactgcttcacatgccttacaaggagaagaggtccgtgagaattttgactcatcttttgccgctctttatcatgatcttgatatgggatttacaccgatcaactttacattttactgggcacctctaccttggaatcgtgctcgtgatcatgcccaaagaactgttgctaggacttatatgaatataatccaagctcgtagagaagagaaaagaagcggtgagaataagcatgatataatgtgggagttgatgcgttccacttataaagacgggactccggtacctgatcgagagatagcgcatatgatgatagcccttctgatggctggacaacactcttcgtcatccacgagctcatggattatgctttggttagccgcacgaccagatatcatggaagagttgtatgaggaacaacttcggatttttgggtcagaaaagcccttcccgcctttacaatatgaagatctttcaaaacttcaacttcatcaaaatgttttgaaagaagttctgcgacttcacgctcccatacactcaatcatgcggaaggtcaagaatccaatgatcgtgccaggcactaaatacgtcattccgacgtcgcatgtactcatctcatcgcccggatgtactagtcaggatgccactttttttccagaccctctcaaatgggatcctcatcgatgggacattggatcaggtaaagtcctaggaaatgatgcggttgatgagaagtatgattatgggtatggtttaactagcacaggagcgtcaagtccatatctaccttttggtgcgggtcggcatcgatgtattggcgagcaatttgccacattgcagctagtgacaataatggcaactatggtgcgtttttttaggttccgcaatatagatgggaagcagggggttgtaaagacagactattcaagtctattttcgatgcctctcgcaccagccctgataggctgggaaaagagatga

SEQ ID NO: 183 - DNA, 1794 bp, Erysiphe necator
  source 1..1794: mol_type = genomic DNA
atgtttatgatattatttctactaatatattttactacttttctctcttctgttattgcgactcccattgtaccctactatccttcggatccccggccttctggaagtggctctatgaattcttcttcatacgacaacgacgacgaagacgatgatgatgattcttcaccgcaacgtggtcctataattcagttgagttatgcaagaattctcggttctagtcgaaaaggaattgatagttttcgtggtataccctatgcaaagccacctctcgaagaattgaggttacgacgaccacagccaataactgagaatattggtaccgttgatgcctcagttaaaattcctaactcttgccctcagcaattcacatcgacaaaccctaacaacactgttcctcaagatgcattgcaacaaataattaatactggtgctgtacagcgcctattacacattaatgaggactgtttaactgtcactgttcaaaaaccatcatatgcgactcccgactctaagtttcctgtcgtgttctctctattttttggagggtttggttttggttcaacggcaatatatgatgcctctaaacttattcaagcaggtatcaatgcaggtaaacctatcgtctacgttgctgtaaattatcgtttgggtgcatttggatggcttggaggaagagaaattaaagaggcaggtctcgctaatcttggccattacgatcagattttggggctccagtgggttcaggataatatagcccaatttggtggtgatccagataaggtcaccctgtttggaacttcggctggctccatttctgcttttaacttaatagttgccagagatggaaatttatcttataatgggaaaagactctttcgtgcggctattatggatagtggtagcattgttcctactgatcccattgattcgccaaagccacaaaatatttttaacaatgtcgtaaaggcagcaggctgctctggtgccgatgataagattaattgtttacgaggtctagattataatacatttttatatgccagtacttcggtgccaggattgttcgattacccatcggtagcactttcctatattcctcgacctgatggtgaacttttaactgcgtcaaccgatgatttagctgcaactggtaaaatggctcctattccttttattataggggaccaagaagacgaaggtaccctcttttcattggtacaaaaaaatatcactaccaccgaagatatttttgattaccttaagctctatttcttcaatgatgccagcgattctcaaatacaagggttaattgatctttatcctgatgatcccactgccgggtcaccttacaatacaggtcgtaagaacaatatataccctcaatttaagcgattagctgcattgcttggagatttcgttttcaccatgattcgtcgcgtggttttgcaagatgctctggcgaatcgtccaaacatccccatctattcatatattgcatcatacggttacggtaccccaatattaggcacgtttcacgtaactgacatcttgccttcctacggtatcatatctgggtttccgactcgcagtgtacagaattactatctcaattttatcaacgatttggaccctaattctggaagcagtagtgagtttatacattggccagcgtggaatgaaaataagcaagtaataaactttcggaagtatgaaaatgatatctgggatgatgattttcggcaacaatgttcagattacttaattaataatcgcaagtcgcttcatttctga

SEQ ID NO: 184 - DNA, 1371 bp, Erysiphe necator
  source 1..1371: mol_type = genomic DNA
atgccaaaatatgtccatctagaattcagaatgtttcagtggcttgtaacttcacccaatactatctccattattcttttattaatcttgaccacgctcttcgccacatcagctggcgcacatcaatccccaactgccagatctcagcagctagaagaatccttgcaatccgatgctctatggaacagcaatattacccacgacttatttgatgagttaaaagaactagcccttattgccgacatctcttattgtgttggtatctttggtatttcgaaaccttttgtctgcgctacacattgtaaagagtttctaaactttgagctcatcgaaacattccattcaacatattcgccgtttggcaattgtggctttattgctttggatcatggttcaggccaaaatgatggacgtattttggtagtttttaggggtacacacagcattactgatgcaatcctggatctattaatgatgccacaaaaattcaccccctatccttcagatctccaaaatgaatacatgaattcgcaatcgaactttatcttacaaccattgcatgatataattgagtggcctgttcagagattcattcgatggattttccgacaaagtcaaactacaaaaagccaggggaaacattacacccctaaatgtaaaaattgtaccgttcacctaggcttttggaaaagctataaaatgatacgtcaccttgttcttccaaatatacagaaacttcgacaggaatttcctgaataccaattgaaccttgttggtcactccttaggtggagctgttgcaactcttctggcacttgaacttgagtctttaggttattcgcccaaagtaacgacttttggtgagccgcgtattggtaattatggcttgaaagattacgtcgatactgtatttaatttacgctctggagactccaatagccagacaaatttcccaagtagcaaaagccgttatcgacgcgtaacacactttagtgatccgtttccattacttccaatggaaaaatttggctatcgctcccatgctggtgaaatctttatctccaaaaaaaaagtaccaccggctgtagaaaacgtgcgactttgcttcggtgatgacgatatgaactgtatcgcaggaaaagatacgtatgagacttgggaggaattattagaagttataaggactaatattgagaaaagaaactcatctaacgtaaaaagtattaatgaattaaagaagagaaaggagaaccgaatattgcctttggacctcttgcaattatacttgggccacgttgattatttctcacggatggacttgtgtcttcttccaggcggaaaaaatatggaattcggaagagatgaagtatag

SEQ ID NO: 185 - DNA, 981 bp, Erysiphe necator
  source 1..981: mol_type = genomic DNA
atgtctagctctttagatcaacttaaagcttctggaactacaattgtctgtgactctggtgattttgaatccatcgggaaatataaaccgcaagatgccacgaccaatccttcgctcattcttgcggctacaaaaaaacctggatattctaagttgattgatattgcaatagcttacggaaaggaaaaaggaggcagtattaatgaaaaagtcgatgctactctcgatcgtcttctagttgagtttggcaaagaaatcctaaacgtggtacctggaagagtctccaccgaggttgatgctgcattctctttttcaattcaaggctctgtagaaaaggctctccacatcattaaactttacgaatcaatcggtatcgacaaatcgcgaatccttattaagatcgcatccacatgggaaggaatacaagctgcgcgaattttacaacgtgatcacgcaattaatgtaaatcttaccctcatgttttcgcaggtacaagccattgccgcagctgaagcagacactttcttaatctcaccctttgtgggtcgaattcttgactggtacaaagcgaaaaccggaaagacttacagtaaagaagaggatccaggtgtgcaatcagttaaagaaattttcaactattacaagaaatttggttacagcacaattgtaatgggtgcctcgtttagaaacgttggtgaaataactgagcttgctggatgtgactatttaacaatttcgccaaatcttcttgaaatcttatcaacttctaaagaaatcgttacgaaaaaacttgatgttagcagcgctagtgctcttcaaatagagaaaaaatcctacataaatgacgagccttcttttcgctttgatttcaacgaagatcagatggctgtcgagaaattacgggaaggtattagtaaatttgctgccgatgccattgaattaaaagatattctccggaaaaagattgagtccgaaatgtag

SEQ ID NO: 186 - DNA, 1731 bp, Erysiphe necator
  source 1..1731: mol_type = genomic DNA
atgaaaccaattcttacccaaccttttctgggccatccaaagattctatgtagagccgtacccagacttatgaaagaatacatatcaacagattcttttcagcttcttccagaggataaaaaagcaggattagctgaagaaagtctctattatcagcaggtcaaggaggtggagaagtggtgggcaagtccaagatatcatggtattaaaaggtcatatacagcagaagatgttgtttcaaaaagaggtagtcagctgcactcttacactagctccgtaatggcaaggaaacttttcaacttggtgaaagaaagagaggcagctgggaagcccatacatacaatgggtgttattgatcctatacaaatgacacagcaagcagtaaatcaagaagtactttacatttctggttgggcgtgttcttcaacactcactaccacaaacgaagtctcgccagacctcggtgactacccctataatacagttccaaaccaggttcaaaggatggctaaagcacaagatatgcatgatcgaaaacagtgggacactcgaagaaaatggtcagcagaagagcgtgcaaggattccatacatcgattatttgcgacctataattgctgatggagatacaggccatggtggactttctgctgttttaaagctttcaaagctttttgctgaaaatggggcagctgcagtacattttgaggatcaacttcatggcggtaagaaatgtggacatctttcaggaaaagttctagttcctataggagaacatatcaatcgtttgctagctgcaagatttcaatgggacctaatggggactgaaaatctcctcatcgctaggacggactcggagagtggtaaactaataagtagtgcaattgacgttcgagaccatgaattcatactaggggtcgccgaagaaggagttgagcctctatctgaaaaattacaagcaatggaaatgcgtggagcttcggctagtgatataaattcatttgaggtagagtggctgaagaaaactaacttgataacttgtgatgaggctatgattcaacaactaaaaaataatcctaatttagctcacgagtatgaagtagaggttttcaaaaataaaaatctatctattatgaagcgcaagcagttagcggaaaatctgggaaaaaagagagttatattcaatattgatatcccacggacaagagaaggattctaccactatcgatccggaatagcagcagctactaaaagagctattgactatgcgccgtatgcagatcttatttgggtagaaacaggagatccatcagtccagactgctgctaaaatatcgaccgatatacataatagtcatccacataaacctcttgtatataatctgtctccatccttcaactggatgtcttgtggatttacttctgaaactctaaaatcatttatttgggatattgctaagtttggatatgtcatacaacttgtttctcttgctggcttacatagcactgcaacaattacgaatgaattaagcaaaagattcaaagtagagggtatgcttgcttatgtagacttaatacagaagcgggaaaaagagcttaattgtgatgtcttgacgcaccagaaatggagtggtaccaattatattgatggtgtgctaggttctatccaaagcggaaatagtattagcaaaggcatgggagaagacaacaccgaaaaacagttcttgaaataa

SEQ ID NO: 187 - DNA, 1359 bp, Erysiphe necator
  source 1..1359: mol_type = genomic DNA
atggcaaagtatctagatacggtatatgtttctggatggcagagttcctcaacagcttcagcatccgatgagccaggtccagatctagcagattatccttacacaactgttccaaataaagttggtcatcttttcatggcacagctcttccacgatcgtaagcaaagagaggagcgtttatctattaagtcgagagtagatcgccaaaaattgcctaatatagattatcttcgtccaatcattgcggatgcagatacaggccatggagggttaacagctgttatgaaattaacaaagttatttattgaaaaaggtgctgcaggaattcatattgaggatcaggccgctggaaccaaaaaatgtggccatatggccggtaaagtactggttccgatcagtgagcatatcaaccgactagtagcgattcgagctcaagcagatattatgggatctgatttacttgctatagcaagaatagacgctgaagctgcaactctcattacctcaacgatagatcctcgtgatcatgcctatattctaggctccactaactcaaaaattcagccgctaaatgatctcatgctcgctgctgaacgagctagtaagagtggtccagaacttcaagctattgaagatgattggataattaaagcaggccttaaaactttcaatgaagcagtagttgaatttattttcgccagtattcacgtcacaaaggacgagctcactgcacgcttcctggagaacgtaaaaggtaaaagtaataaagaggcaagagcaattgccaaagatatcacaggcgtagatatatactgggactgggaaagcccaagaaccagagaaggttactacaggctacgaggtggttgcgataacgcaattaatagagcaatcgcctatgcaccatatgctgatgcagtatggatggagagtaaattaccagattttgcccaagcagaggagtttgcaaatggtgtacatgccgtttttcctgaaaagaagttggcatacaatctctctccctcattcaactggaaaactgctatgacacgcgaagagcaagaaacatatattcagcgcctaactaaattaggatattgctggcagtttataactttagcaggtctacatagcacagcactcattagtgatcagttcgctcgagcttataagaaacagggaatgcgggcctacggagaacttatacaagagccagaaatggaaaatgacattgatgttgtcaagcatcaaaaatggagtggggccaactatatcgacgaattactgaaaatggtccagggtggcacttcaagtaccattgccatgggaaaaggtgtgactgaagatcagttcaaatag

SEQ ID NO: 188 - DNA, 1629 bp, Erysiphe necator
  source 1..1629: mol_type = genomic DNA
atgacaactcaggcttcattgcttcatatggtagctgtatctgggactataactgacttcaataaaaagattctaactagcgatgcattaaattttttagcccttctccataattcttttaacgaaaatcgtaaacaactccttcaacgacgagtcatcaggcagggagagctagataggggcttcttgccagactttcttcccgaaactaaatatataagggaagatgatacgtggaagggtgcaaagcctgctccaggcttaattgatcgtagagtggaaataactgggcctacagatcggaagatggttgtaaatgctctaaattcagatgtatggacatatatggccgactttgaagattcaaatgcaccaacatgggataatatgatcaatggacaagtcaatttgtatgatgctattcgtagagaaattgactttaaacaaagttctaaacaatacaagctcagatcagaccgaaaacttccaacgcttattataagacctcgtggctggcacttagatgagaaacatgtaactattgaaggagagccaatatccggctctctattcgattttggactatacttttttcacaatgccaaagaactgataaaacgagacttagggccctacttttatcttccaaagatggaatcttatctagaagcccgtctttggaatgatgtcttcaacctagcacaggactatattggtatttctcgtggaactatacgcgctacagttctaattgaaaccatacttgctgcatttgaaatggatgaaatcatatatgagctccgtgaccactctgctggtttaaattgtggccgttgggattacatatttagcatgatcaaaaaatttcgtcaccatagtgccttcatacttccagatcgatcgaatgtcacaatgacagttccatttatggaagcctatgtaaagcttctgattcaaacctgtcaccgacgtcaagtacatgctatgggaggtatggcagcccagatacccataaaggaggataaagtagcgaatgaaaaggctatggaaggtgtttacgccgataagcttagagaagtaaagagtggacatgatggaacctgggtagctcatcctgccctagcgtctattgcatctgaggtattcaataagtatatgcctactcctaaccaaatatttgtgcgcagaaatgatgctaagattagccggcacgacttattaaatatgaactttgcagggaaagtgactgaagatggcatccgaaaaaatttgaatattggactcggttatatggaaggatggctgcggggcgttggatgtgtacccatcaatcatctcatggaagatgctgctacagctgaagttagtagatcccaactttggcaatgggtaaggcatggcatccagacagctgaaggaaaaaaagttgaaaaatcatacgctttaaaactacttcaggaagaagttgataagctttcacggggagggtccacaggtaacaaatatcagctagccgcgcaatatctctctgggcagatagtaggggaagattatgctgattttttgactttactactctatgatgagattacaagtataagtagtccctattcgacatttaaactatag

SEQ ID NO: 189 - DNA, 1392 bp, Erysiphe necator
  source 1..1392: mol_type = genomic DNA
atgtctttaagaaacttgctaactttgacattggggcccctttctgtctctgttcgtacttatgccaacgttacatcagacatcaaagaaggaattaaagctcgagttgatgaaaagcgagagcttctcaagaatattaaagttcatggagacaagaatattgggaatttgaaagtagctcatgtatatggcggcatgagaggactaacatcgatgctctgggaaggatcagtattagaccctaatgaaggaattcgtttccatggacgcacgatcaaagattgtcagcgagagttacccaagggaaaaagtggaaaagaaatgttgccagaagccatgtttctgctgctcttgaccggcgacgtaccctcaatttcacagactcgtcaattttctcgtgatcttgctacgaatgcccatctacctccatttgttgaagagttgttggatagattccctaaaaatgtccatcctatgaatcagttttctattgctgtctcggctctttccacaacatctgagtttgcaaatgcatacgagacaggttgtgataggtcacaactctggttaccagcactcaacgattgtatatccctaattgcaaagcttccggtaattgcagcaaagatttaccaaaatacatatcgaggtgttggtcctttaccagcgataattgatccggaacaagactggtcgtataattttgcggctatgctaggtaagggagggaagcgtaatgaagactttcaggattttcttcgtttatacctggctctccatggagaccatgagggtggcaatgtatcttcacatacaacccatttggttggtagtgcactgagcgatccattcctaagctacagtgctggtcttcaaggtctagctggccctcttcacggtcttgctgctcaagaagtacttcgctggattcaaatgatggaagaaaatatggggcctaattacacagtagacgatatgctcaaattttttcaacaaaccttggaatctggaaaagtaattcccggctacggtcacgctgttcttcgtagagcagatcctcgattcgaagcacttatggaatatgccacatcacgtcctattgctaatgatccaaccttcaaactggttaagaaagtttctgagcatgctccccaatttctcaaaatgaattgtcgaattcaatgtccgtatccaaatgtcgatgcgtcaagcggtgttatttttcactactatggcttccgtgagactctatactatacagtaatatttggtgtcagtcgggcattaggagcgttgtcacagtatatttgggatcgagctctaggcctaccaattgagagaccaaaaagtataaacatggagagcctactaaaaaaaatagaattgcagtaa

SEQ ID NO: 190 - DNA, 1191 bp, Erysiphe necator
  source 1..1191: mol_type = genomic DNA
atgctgcgtagtataacgacaaactatcgtcaaactcaagtcttccgcaaattaaaagtcttccgtcctataatgagccaaagatccaaaagtgggccttttggatacatccagacaaaggcacttgtcttttcgaaatatggcgagccagaggaggtactctctcttcatcaaagctctattacacctactattcctcccaattctattctcttaaagacattagcgagccctatcaatcctgccgatattaatcaaattcaaggcacttatccatcacgaccatcttttacgtcacttctgggcaccacgctaccaagtgctgttgctggaaatgaagggtgctttgaagttacttcagttggctctttagttaaaacggtcagtcagggtgattgggtcgtcatgaaatcttcctgctttggtacttggcgtactcatgctctcgcaaaggaagatgatgtattacgcatagataaaaaagggattaaccttattcaagctgccacagtatcagttaatccttgtacagcttaccgattgttaaaagactttaaaaagttagatgagggagattggtggattcaaaatggagcgaatagtggtgtgggccgtgttgccatccaattaggaaaactatggggcttaagatcgataaatgtaatccgtgaaaggccagattcagcatctacagaaattcttcgcaaggaactattggacttgggagccacacatgttcttactgaaaaagagctaatggatagaaattctcatgatcgaattatgaatctaaatgataatggtaaagaaattataaagttaggattgaattgtgtaggtggaaaagctacgaccgcgctggtgaaatgtctcgggaaggatggtcatctcgtcacttatggtggtatgtctcgtcggcctattgaactcccaacgggtcgactcatatttgatgatttacgttttagtggcttctgggttagtcgatgggcggctgagaatcctgaagagaaaaagaggatgcttgatgaaattttgaatcttattcgtattgggttactcagggacgtaaattaccagcagattaaatgggtctgggatacagatctgcacgtactcaaagatagtattcgtgggacattagacggttttagatctggtaagagtatatttgtgtttgaagatacatga

SEQ ID NO: 191 - DNA, 3297 bp, Erysiphe necator
  source 1..3297: mol_type = genomic DNA
atgatcaatatacataaaagaaccttatttctgagcacgaacgactcgtcaacaatatcaaagtttccagaatatacggatcttttggagagtactccaagaaatatttattcatcaaacggctcttccgatattattaactcaggtttatccgattcagaaagtatgcctcccgatgatgacttgcttataaaccaagttactattacaccaagacaagaatcattttcagagcctgttcatgatgatgcttttcatggaaaaggcatgaggattcttcgttcacaaacagtgggatatgttgccccaatttttatgggcaagcgagtccagaaagatgatgttaaaaagcaaatagaagtgggaggtcttattcctgcgtcagttgtagataatgaaattgcctggttctatgaagaactagggattgatgatgtttatttccagtcagagactgtcgaagagatctctcgcctcattatttcactctatgctgctaaaatcactgcctgggctcataaagagaagaggcaggagattagattagatatggaagctgctgatcacgcaatctatatcgacacaagcgagcctggtgttagcaaaagcgatggatctcgatatgagcagcggctagaatctaaatacctggatgtctctgcatcttcagatatttgctatcgagtagaaacatttcgctcgacaacaagtctccctaggatgtatgagtctaactctactatgcgttgttattttgtctatcagtgtcgctttgtgaatcctagtccctcaccccaagaaacttgccttgagttaattggcgaccgaatgtttctcgccaaggcaactaagaatactctacagatttatcaggatgttataaagagtgcggtatctagaacaggacctgtaattgaaacattcaacgtcgaaaactccaataaaattcgacttgttatcgctttccgtcgaagaaccgctcttggaatattctctgcgctttctgacctttatcattattatggaataacaagttctcgcaagtatgttgaacaatttagcaatggtataacaattatctctctgtatctcaaaccatcaagtaacttagatcccacaaaatttccacctcttgatgtctctatacgtcatatcaggaatgaaatttcactgttgtattgccttcctcaaaatcgatttcattcgctctatgtcaatggtcaattaagtcttcaagaaactatatatgcacattgtctaatgatttttgtccaacatttcttgaatcgccttggttcagagtattcgtctttagtatcggctttggatccatctaatgggatccatgtcgaaatactaacaaaaatcaagcgacgtttgagaacagaaacatttaccgcagattatattacagagattattaaggcccagactgatctcattcgaccactttactcgtcgtttgctagcatccacttgactcgatttcgtgatccacaagaagaatccagcccacactctcctatgccagagccttacactgagaaacaattaagagaattgattgcaaaaagttgtcaaaacgaacatgaagagcttgtaatgaattcttttcttacatttaataactcggtacttaagaccaacttttataccactactaaagttgcattaagctttcgattaaacccttcatttctaccagagatcgagtatcctcaaccattgtatggcatgtttttggtaattggctctgagttccgcgggtttcatctaagattcagggatattgcaaggggaggtattcgtatcgtgaagtcacgaaatcgtgaagcatactctattaatgctcgtcgtctatttgacgaaaactatggtttagccaatacacagcaacgaaagaacaaagatattcctgaatctggatccaaaggtgttatattacttgatgctcagcatcaagataagagcagtgtcgcctttgaaaagtatattgatagtatactggaccttctaatcccagctaaatcaccaggattcaaggatcctataacagatctttatggaaaacaagaaattcttttcatggggcctgatgaaaacacagcagatttggtcgattgggctactgagcacgcacgcaaacgcggtgcaatttggtggaaatctttctttacgggaaagagtcctaagttaggtggaatccctcatgatgcttatggcatgactactctttctgttcgggaatatgtttgtggtatctatagaaagctgggtctcgatccaacaaaagtcagaaaaatgcagactgggggcccagatggtgatttgggcagtaatgaaattctcttaagttccgagatgtatacatctattgttgacggaagtggagtccttgtagaccctaatggaattgatcatgaagaacttgtcaatctagcgaagaagaggcaaatgatatctcatttcgacatgagtaagctttcaaaagatggttatcgtgttctcattgatgagaataatgttgtgctcccaagtggagaaatcgttaacaatggtacaacctttcgcaatacttttcatcttagagtcgacaacatgactgattgctttgttccttgtggtggccgaccagaggctattgatctctctaatcttaacaaaattatttgtaatggtaaaagtacaattccgtatattgtcgagggtgcaaatctctttatcactcaagatgcaaagattcgtttggaaaatgctggatgtattctctttaaagatgcgtcagcaaataaaggtggagtcacatcttcctcactagaggttttggcaagtctcagcttcgatgataaagaatttgaagagaatatgtgtgtagatcaagatggaaatgctcctagcttttacaaggcctatgttgaggaagtccaagaaaaaatcaaggagaacgctaggcttgagtttgaagctatttggcgagaaagtatcgctacgaaaactccaaaaagtatactttcagattctcttagtattgccattacaaaacttgatgaggagctacagcagactgaattgtggaatgatcatgaacttcgcacatcagtcttaagagatgcattaccaaaattgctcctgtctaaaattggcctcgatctaattatccagcgagtccctgataactatcttcgagctatatttggaagttatttagcgagtcgattcatataccaatttggtacttcgccatctcagtttgcattttttgattttatgtcaaaacgtttcttaacaaaatcttga

SEQ ID NO: 192 - DNA, 1179 bp, Erysiphe necator
  source 1..1179: mol_type = genomic DNA
atgacagcaaaaatcgaaacagataatatgccagctcaaggaatggataatgatggaacatctaatgcttggtctcatccaggtcctgcagcttttgattttcggagcgacgttgttacatcacctacagcctcaatgctcgaagccatcaaaaataccaccttgttagatgatgtttttcaaactgacccaacaactaataacctcgaagcccacttagccgaacgtacttctcatcaggcagccatctttgtcctctctggcactatgggaaatcagttagcaatacgatcccaccttcagcaaccaccgtatgcagtgctctgtgatcatcgtggacatatttttgaatgggaagcaggtggagtagctagtctctgtggagcattaataaaaactatcgtaccaagtaacggcgaatttctcacccttgaagatatagaaaaaaacgttgtgctaggtgatgagatacacagcacacccacccgtcttatttctttggaaaacacgctcggtggcattataatgcctttaagtgagactcgacgtatctcaaaatttgcccgagagcacggaatcaaaattcacctcgatggtgcacgcttatgggaggcagtggctgcaggtgcaggctcgctcatagattattgtgaattgttcgacagcgttagtttgtgtttctccaaaggtctcggggcacctgttggtagtattttagttggtgaagaggccttcattaagcatgctagatggatacgtaaatcaattggcggaggcctccgacaatctggagtattaacagctgctgcgagagtggctcttgatgaaacattcggaagtggcccttggggagatggtggtaagttgaaggcaagtcattctttagccaaaaaaatagcgaattcctggacggcgcgtggtggtaaattactaaagagaactgacacaaatatggtatggttggatcttgaagcctcaaatgtgaacgtagaaacatttgtgaagattggaaaagagaacgagcttcaaattgcaggacccagactggttgtgcattatcagatttgcgatgaagcggttacgaaattggaaaaaatttttgaggatatattgattaaatgtagaccaaatgaaacgataaagacatccattggaaccaaagtttatggggtagtttga

SEQ ID NO: 193 - DNA, 1029 bp, Erysiphe necator
  source 1..1029: mol_type = genomic DNA
atgtcaccatggttcgatttcttgagaccttcatttgctggtccaatctctgcaaaattaatacgcattgctgaaaagccttggtctgtttcttttatgccacaaaaacaaactcggcacagctcccattctccgttagcaccttcaagtgataatgcaaggagaaaaatcaccttaaatactattaattcattgtataagaagggagagccgattatggtacttaccgctcatgattttcctagtggatatattgcagatatcgcaggtatggaaattatcctggtaggagatagccttgcaatggtatcaatgggattggaagatacaagcgaagttctccttgaggacatgttacttcattgtcgctcagtttccagagccgttaaaactgcatttacggtaggcgatctcccaatgggttcctatgaaatttctcctaaacaggctcttaactctgcaatcagattagtaaaagaagggcgtgtaaaaggtgtcaaattggaaggtggtctggaaatggctcccagtgtaaataagatcagtaccgccggaattccagttctcggacatatcgggttaactcctcagcggcaaaatcatctcggtgggtttcgagtacagggaaaaacttctggaagtgcattgaagattctccaggatgcactagccttgcaaaaagccggatgttttgctattgtaattgaagctgtaccagctcaaattgcaactctcattaccaaagaactttctatcccaactattggcatcggtgctggaagtggctgctcaggtcaggtccttgtccaggctgatatgacaggtaattttcctcctgagcgcaacgtaccaaaatttgtcaaaaaatattgtgatgtatggagtgaaagtctgaagggaataaagaaatatcgtgaggaagctaagtctagaaattatcctgcatatgaacacacatatcctatttctgaggaggaacttatcgcttttgagagggaattggcgaataaaaggttcaaaaaagattga

SEQ ID NO: 194 - DNA, 1263 bp, Erysiphe necator
  source 1..1263: mol_type = genomic DNA
atgattgagcttggattaagtcgtatgggcaggcttcttaagcatacgccccaactgtggaagggaatacatgttgcaggaacgaatggaaaaggctcagtctgtgcatatctttcggcaatgttaaatgcaagtggtgttcgaagtggtcgatttacatcaccttttctcatagatcgaattgatgctatcacaatcaatgaaaaagtagttaataatcaaacttttgaggatgcggaagcaaaaattttggaaattaatcgaacacataaaatccaagcgacagaatttgaaataatcactgcaattgcatttgaagtatttgcacgagaaaaaattgatattggagtaattgaagtaggattaggaggtcgacttgactcgacaaatattatggaaaaaaaagcagtaacagtgattaccaaaattggactggatcatcaatcatggctcggtaatagtgtagaagaaattgcgcttgaaaaagcgggaattatgcgtacgggtgtaccatgtgttatcgatagaacaaataatgaatcagttcgaaatgtaataaaggaacatgctcaaaagattggaactgatatagttcttagttcaattgattctcctttttttgaagatcttaaacatgatcatttagatctagaacctcatcaacaagataatttagcttgtgcttatactgcttttcatcttggatacacaagttcagaatcaccattacatcgactattaccagcgattaagaaagtggaatggcctggaagattacaaaaattagatatagaatgtatcacacaacggaaagaaacagttctactagatggagcacataatgctcaatcagctcaagtactaggtgattatgttaatcgtaaagtacgaacgacatcgaacaatacagtaacgtggattctcgcggtttctgaaggtaaagatttaaagcaaatcttgaaaccgttacttcaaaatgaggattatgttggagtagtaaaattcaatccagtcgatcgaatgccctgggtgagagccactgcgccaaatgaaatcctctcagccgcatatgaattaggaattgatcctttacattgtcataacgcagagtcagatgtcttaaacatccttcaatgggctgcaacaatttcaaatagaggacctattgtgattgctggtagtctctacttggtctcggatgttctaagaattattagaactgtaaaattgaaacagaaattaggttttggtcaaaaatcctaa

SEQ ID NO: 195 - DNA, 963 bp, Erysiphe necator
  source 1..963: mol_type = genomic DNA
atgaattcaaaagaaacgattatatcattgacgtccgacaattgttcaataaaaaacaatgatcatgaagaataccagtatctaaatctcatccgagaaatacttcagacaggggagcaccgaccagaccgaactgggactggaacatactctattttcgcaccaagaccattaaagtttcagctttcagcttctgggaagcctatattacctcttattactactaaacgcgttttcatacgagctattataactgagcttctttggttcatatctggatcaacttcttctattcctcttgcagaagctggtatcaagatttgggacggtaacggaactcgagaataccttgattcagttggtctttcgcaccgagctgtgggagacctggggcctatatatggatttcagtggcgacattttggcgctgaatacgttgatgctacaacagattacacagggaaaggtgttgatcagctcaatgatgtaattactaaattgaagacaaatccctatgatcgacgcattattcttactgcctggaatccgagtgatctcaagctgatggctttgccgccttgccacattctagcccaattttatgtttcatttcctcggggtgataaaaatatcgggaccctacattgtcaactatatcaacgtagttgtgacatgggccttggggttccgttcaacattgctagctatgcattactcacgcatatgttggcccacgtttgtggcttacatcctgggaccttaacacatgccatgggtgatgctcatatctatgctgatcataaagagcctttgaagatacaacttgaacgagaaccgcgaccctttcctgagattgagattaaaagacaaaaatatggcagtatagatggttggcacgttgatgattttattatcaaagaatatcaaccacacaatagtatcccaatgaatatgtctgtttaa

SEQ ID NO: 196 - DNA, 933 bp, Erysiphe necator
  source 1..933: mol_type = genomic DNA
atggaaaattctgggataatagcagcgaaaaaagaacgaagcgcttgttggtcaaagccaaaagtttctgccttccgaagactctcaaaacatctgcacaggaggaagaagagagcctccaaaaaggttcctacggacttaccagacatcgagataataacagagcaagtggaaagaagtgtggagaaaaaaataaatgaaattagatcacaatgggaaatgcgtgcgatgctcttagccaaaaaaaatgaggaatcacagaagaatttctcaataccagaaggagagtcagatgtaaacatattacctggcaatcacacaaatgaaggggataaaaaacctatttcgtgcatgaccacaaagaataataatggcgataatattcaagaagctattagactgcatgaagccggagagttacaaatttcaacggagatgtttggccgattagcagaatcaccaggtgaaaataataacttgagccaagtgctatatggtctctctctgaggcatggctggggatgcactccggatcctgttaaagccctcaaatatctatcagcagcagctacaagtgcagcatccattgaagattccgcattgaaagcagggaagaaaatgggaggattagctagaggtgaattagttattgcgatatatgagcttgcaaattgctttcgaaatggttggggtcttcctgtcgatgaggtagccgcaaaacagtattatgaaactgcagctaacttaggtgatactgatgccatgaacgaagtcgctcagtgttacgtcagtggatttggatgtaagaagaacaagtttttggcagccagatactatagaatggctgaaagagagggaagtaaagttttagggaactcttggatatggaaagagaaatacaaccttccgacacaggttacatttaaagactga

SEQ ID NO: 197 - DNA, 1548 bp, Erysiphe necator
  source 1..1548: mol_type = genomic DNA
atggctaaagctgagacattggctcaaaaaatatccaatctagcttatccaacaccaagagatttcgatcctgaggatgaatatccagttagtgaagatgaagcttctgaatctgaggaagaagaaagtggtgatgatctagctggaacagagcattacgttcaatcaggtaaaagtaaattacgaaagccagaacaaataaaccttggacccaaatattctggttctcaaataagtcgacgggctttgtttgcagatcatcaaaattactcccttgatgttttaaaaaatggacccaatcgctcaagccccgaaaacttttctaattctggagaagaagactgcaattctagcctggaagatgagagtatcgacagcgaagaagttcaaagtgatttggaagaacaaataccttctaaagtcaaaaatacgtcaaagtacagcaaagaagtgactagccttgagggagagaataaattgcccaaaaaccatgaaaccgatcatctggataacaattactctgatattagcgactctagtgatagcgatcatgatagatgcgactcaaattttagtaataggaatgacaaagagattattaaacggtctgaaattcaaagatttatggaagaagatcaaaaagcaatattatcaactttatctcaagcagcaaaggtagatgcagaaaagggaagggcaattaagtcacaacaaatgagattcgattctcttctaaatacgcgaatggagctgcagaaagctctgatagcagttaattctcttactacctttcaagatgataattctattttctccaaggataagccatacgaagcagctgaagaagcagcattaaaactttggaatagattatttgagtttcgcaataatttatctaagcccacaacaactcatgaaagagctcgaaaaataataacttcggatcaaaaactatcttcagcgatgtgggaaaaaatgaaaaatttagaatctgcatctattgatgatcgtcaaaaaattattgaaaaatggtctattaaaactcggggctccatgactcatcctcttactgaaaaacttaaccccacaataactcagcaaaatattatatcatttctgaatgatcatcttgaaaattctgagcaactaattaggcgtacgaaaatacctcgctcatgtgcgcctatacaacgtgatttaaaacttgtcgaagatcctaatatctatgatgacggaaatttctaccaaatgctgctgaaagaacttgtggagcaacggagatcagaattatcaagtatgcctgttacctccactacagataaccaaattaaaccatggaccgcaattaaagaacccaaggtgcgaaaagttgtagataaacgagcaagtaaaggccggaaaatgcggttcactgttcatgaaaaactccaaaactttgcagctcctgaagaccgaagctcatgggaacagttagcggttaatagactgtttgcttctcttttaggacagaaagtagtcatagatgaatgtagcgagagtgatcactga

SEQ ID NO: 198 - DNA, 1989 bp, Erysiphe necator
  source 1..1989: mol_type = genomic DNA
atggctagggcccagcagtacaaatttccaccacctccacctccccctggcccaccctcatctaattctcaaatacaccaatatggatattcacaacctcctcgatatcagcagcatatgcagcgtggtggcggtatactacgtggtgggcgtggtgggcgtggtggtaatgttggtggtcgtggtgagtttcatggcaatgtttcatataacattcaacattctagtcctggatatgacccacggcaccctcaacagaatcaaattcccgtctcgacatctggtttcaataacagcccaaatggtgtaccaagtcctgcttcatatattggtcatcagcctggtccaaatacacctcaaagttacctatcaaatcaatggcaaagtaaccaacacatctcacagcatgttcctactcaaccagtctcaatgtcacctcagaactaccacccgaactatgcgcctcaaccatatcaacaacctcattacactcaacaacgaccatcataccaagctcagccgccatcttatggccacagtattcctccaaatcaatcgcctcacgtagctccacatttaacacctcaggctacatcaccgcagtggcaaagcccatctcaacataatcgaacgccttacagtaaccaccgtggccttggtggctttaatgttggaggaagagcgtcatatgattcacctgcacctcttatgggtccaccaatacgcatgggatttgataatgatcctggaggaggccatataactcaagtgggtaatggcttccctaatccacatataaatcgtcattcctcttctcccttcccgccgacacattttcgaggttattcaccgcaagacttttctccaggtccgcagcgatcagccgtcgattcaaactcttatcacttatctaataaagtaaaaggtgggagttcaaattttagaggcaaaagtcgtggtgatttcaaccaatctcagtcacgaaatcgaaatgaaagccgataccatcagaatggtggtcaaaagtctagctctgatagctatcaaaagtctgtaaccgcagattctacgggtaagaaaaagaaaaaaagaaagaccaatactctcggcttaacaccaaatgatatcgaacatgaagatagtgatgatgatgttgacgatgttgatgaagaagctcgactggtaaccttgcttggtccagacactccacaattaccaacagaccttaaaatctggcttgcagagcgaaagaaaaaatttcctaccaaagctgttagggaagcagcggctgaacaacttcgtttacggcgtgcacaagcctatgaaggcaagatcaaaaaagaagaagtcaagataaaaaaagaagaaggagaagaaaagttttcaaaaaaaatcgaaggggaaacaaaactcgaaaaacagcaaagaaaagctgaaaagttacgtttagaacttgaaaaagccgaacgaaaaattcaagaggagatatctggctctaaacgcaagcgtggaaatggtgatgagggtgatgccgattgtggtcaagtgagcgataacgactcggatagttctgcaagctcagactctgatgataaacccgaaaaactttcttcacatacaagtagcttagttcgcaacccaccaccaaaggctcagcttcaacgtcactgcaaatacttttctactggtggtacctgtggcaagaagggcaagtgtcgcttcgtacacgaccaggaagttcgtaatcaagctttaagagataaagaagcaaatggtggcaaaatgacactcgcacagcgccttatcttaaatgatacagccaaagatgatcttactatcctaaaatctattaaatatcttaaggagaaaggtttaatgccagatcaacttactagtgttggacctggatacagtgatgaattgcaggctaaagtctcggaaacaagtgatgatgaagatcttaactacaagcaagagccatcctcctaa

SEQ ID NO: 199 - DNA, 1353 bp, Erysiphe necator
  source 1..1353: mol_type = genomic DNA
atgaaagctaagagcctaatattcatgatggcacttgtgaccagtgcaacagcagaaatccagtttgatgctcgtgatagaatcgaactaatgcatttgagacgaaataaacccttaatgactgcatctgctgaatcaagctgcggctgtaccaccttatattctacctttactggcgagggcgttctcttatttcctccaacgccgtcaacgtcgaccaaactcgtagcacaaccgactccggattatcctcacatagacaaagatacgtgcccaactccggcaacaataactgtaaccgagacaaattttataagtacaactccaggtccaagcacagtaccgaccgattctattgaacctgacgtgattcacaccactgataaaaatgattctgatgtggctcatgccacagagactcccgagcctgatatggcacataccacagatactcctgagagtccagtcttaactatacctggtttatatcttccatctccacctagctctactcctaaagcccaggtacccgcagctccaaataccgactcacttggttctaaaaatggcatgtgggctattacattttccctttttaatgatgacgggaagtgcaaaagtgttacaaccgtttgggctgaggtgaacatgatacgtatcgctggattcaagtctatccgtgtatacggtacagagtgcgatggaattgagaatatcagtactgctactagctttcatggtatgaaactcattattggtgtttttattggtgaaactggttgctctggcgctaaagagcaggtgaaccacatcgttaaatggggtaaatgggatttggtagaactcattgtgatcgggaatgaggctctgtttagtggtcatgcgtcacccgaagagttagccgaatttattacctcgactaaaatcaccctcagatcagctggatacaatggaccgtgtaccacggctgagcctcttaatatttgggaaaaaaattcaggtgccttgtgtggtgctgttgatgtggttggttgtaatattcatccattttttaatccagaaattgatgctagtcatgctggtctttttgttaagagtcaactcgagattgttgaaaagatttgtccgggaaagcatggaattaatcttgagtgtggatggccatccgctggtgaatgcaatggcaaggcctgtcctggggtttcagagcaagagactgccgtgtctagtatccagtcatttgctggtaacacgtcggtaatgtttacattttcaaatgataaatggaaaaatccaggtcgctttcatgtggagcaaagttttggattaataaaactcttaacgagccattaa

SEQ ID NO: 200 - DNA, 309 bp, Erysiphe necator
  source 1..309: mol_type = genomic DNA
atgcagttcaacgtttttgctctctttgctttcatcgtttcagttgttatggctactgagactgtaactgttactgtttgcgctccttcagctacatatgtaccatcccaaggatacgccgcccctacagcacctgcctatgctcctattgcatctggttcacccgctgtcaatatgccaggcgctccttctggaggatacgccccacctgctcaatcacctgttccattcactggttctgcctcttctcacggcgtctccagtctttctgcacttattgttgctggatttgttgcactggccatgtaa

SEQ ID NO: 201 - DNA, 456 bp, Erysiphe necator
  source 1..456: mol_type = genomic DNA
atgcagtatgctcgactgttaatttttgtttttgcggcctttgctgctgccacgccctcaggactaaagtttttccctcgtggccacggaagcgatgacagtcaaccactcacttgtccagaggcagttcaaacgattcctaaatgtgctattagttgcattgttcaacctcctattgatgcgggatgcaagtcagccgccgactttgcttgtacctgtgaaaaaaagacgaagaaagccataacgaaggctgaaaccccttgtgtattaaaagcatgtggattaaaagaagcattagctgcttcacgagctggtaatgcagtttgtgatgcttgtaatgtatccccaagtgatccatctcctagtgatccatctcctagtgatccatcagacggcgattctgaaagttacgaagttgatcaagaaaactaccaagatgaagaagaatcgtattaa

SEQ ID NO: 202 - DNA, 2022 bp, Erysiphe necator
  source 1..2022: mol_type = genomic DNA
atggtttcctcatcacgtaggagttccttactgataggaatatcatctgtcttctatgcattccttcttctattccccttagcactcctaggtcctgcgcaagctgctgatcaagctccattgcaagaaagttatggaactgtaattggaattgatcttggcaccacatattcttgtgttggtgtaatgcaaaaaggcaaagttgagattttagttaatgaccaaggaaatcgaatcactccctcatatgtcgcttttaccgacgatgagcgcctagttggagatgcggcaaaaaaccaggcagcttcaaatccaaaacggactatctttgacatcaagcgtcttattggtcgcaaatttgaggataaagatgcacaggctgatatgaagcatttcccatttgatgtcgttcaaaaggacggaaagccaaatgttaaagttgaagttagtggatcttttaagacttttacccctgaggaaatttctgcaatgattcttggaaaaatgaaagatgttgctgagtcatacttgggaagcaaagtcactcatgcagttgtaactgttcctgcatactttaatgataatcagagacaagctactaaagatgccggaaccatagctggccttaacgtactccgtattgtgaatgaaccaactgcggcagctattgcgtacggtcttgataaaacagatggagagagacagattattgtatatgatctaggtggaggaacatttgatgtatctctactttccattgatcgtggtgtatttgaggtcctttccactgccggtgatactcatcttggtggtgaagattttgaccagcgtatcattaattatctcgctaaaaaatacaacaaggaaaataacgttgatattactaaagatttaaagaccatgggtaaattaaagcgtgaggccgaaaaagccaagcgaacactctcttctcagaaaactactcgaattgaaattgaagcctttcacaatggaaaagacttttctgaaacattgaccagagccaagtttgaggagttaaacatagatcttttccgtaagacacttaaacctgtcgaacaggtgctcaaagacgcaaaggtcaagaagtctgaggttgatgatattgttcttgtcggaggttctacccggattccaaaagttgttgaacttattgaagagttctttggtggtaagaaagcctccaaagggattaatcctgatgaagctgtcgcttttggtgcagccgtccagggaggcgttctatcgggtgaagaaggtactgaagatttagtactcatggacgtcaatccccttacactcggaattgaaacaactggtggtgtcatgacgaagctcatccctagaaatactgttattcctaccagaaagtcgcagattttctcgactgccgttgacaatcaaccagtcgttttaattcaggtctatgaaggagaacgaaccttgactaaggataacaatcaactcgggaaatttgagctgactggtatccctccagcaccaaggggtgttcctcagatcgaggtctcttttgaacttgacgctaatggtattctgaaagtctctgcttcagataaaggaacggggaagtcggagtcaataaccattactaacgataaagggcgtctaactcaagacgaaatagatcgaatggttcaagaagccgagaaatacgctgatgaagacaaagccaataaggaacgtatcgatgctcgtaatgccctagaaaattatgttttctctctaaaaaatcaagttaatgatgaaaagggacttggagctaaaatagaagagagtgataaggaaaccattcttgaggcaatcaaggaaacaacctcttggttagataaaaatggtagtgaggctaccacagaagattttgaagagcaaaaagaaaagttatcaagcgtcgcatatcctattaccagtaaactttattcgaataccggcggcgatgataataagggagagaaagatgaacctgaaagtcatgatgaattgtaa

SEQ ID NO: 203 - DNA, 1941 bp, Erysiphe necator
  source 1..1941: mol_type = genomic DNA
atgactccaacctctgatcggcgagagccacatccttatcttgttggaaactttgctccaattcatgagagtccttgtcttacgcggtgtgactttacaggaaatattcctcctgagcttgcaggtggacagtacgttcgaaatggtggaaatcctctagtgaattcagatctaggacgtgaagcacattggttcgatggagatggaatgctcagtggtgtggtctttcatcgggctgaagacggctctgttgttccagaatttgtgagtcgatatattctgacagattcttatctcatgtctgtcactttaccttccttgcgtcatccaattattcccagtatggcaacgctcgttaatcccgcctcaaccttacttcatattctaggaagtgtttttcgaactctattatttgtccttttctctcacctatctggttccctacagcctatgaaaaggatcagtgtggcgaatactaatattttatatcacgacggacgagctcttgcaacttgtgaaagtggcccaccattgcgagttttacttcctcgtctagagacagttggatggtttgatggttacaaagtggaaggggaaccggcaacagaaaccaaagttggtgaacccttcggcgttagtgtgggaaacttcaacatattgacggaacgaataaccgcgcaccctcgagaagatccaatcacaaaagagctcattcttttccactcaacgttctttgcgcccttcgtatactattccattatacctagtatgcatattaagaccaataatataaaaccaagaagtcttattaacacgcctatacctggaatcaaatctgcaaagatgatgcatgatatgggacttagtcgaagatcgtgtgtgatcatggatcttccattatctcttgaccctttaaatatagtgcaaaacaagccgattatttcttacaatccatctgagccttcgaggtttggtgtcttccctagatgggaaccagaggccgtgcgatggttcgagacaagtccttgctgtatttttcatactgccaatacatgggatgacttaagtctagtttctgagacactggaacttagcaataatgttactgcagtgaatatgttagtttgtcgtcttacaagcgcatcattagtgtataatgcgggaaatattgctacaccagctttagaaactaaaaaagcatcagtttatcccgtagaagaggaacaatgtcgcctatactactatcggttcttactttctgaaacccaaaacatcatcacgcatcaattcgctctgagcgcaattccatttgaatttccaacaattccacaaaatctttcaatgtctcaggctagatacatatatggatgcacattatctaattctacatttggaaccgctctaggcggtgcggcaaaaattgattgtttagctaagattgattctgtgatgttgctcgactctgcgcgagtctcaccacctacgcctataattggctgcgtcgacaatagatcagttgcagaaataataaaatctaataacaaaaatgactcgataaaaatatttaaattaccaccgggttgctttgcccaagagcctcgttttgttcctcgcaatgaaggaaaatctgaagatgatggctggcttctttcgtatgtgtttgacgaaagtcaaatcaatccagatggctttgcaagacctgatgccaaaagtgagctttggattattgacgctataacaatggaaaaaattggatgtaaagtcaagcttcctcaacgagtgccgtacggcttacatggatcctggtttaacgagcatgaaatactcaaccaaagaccagtagataagacaaggagagtttcttacgttggcccccaaaaaaattacaacaagttcaatagaaaagtcatattcaaaaagatactaactttccttcaatga

SEQ ID NO: 204 - DNA, 930 bp, Erysiphe necator
  source 1..930: mol_type = genomic DNA
atgatgtctcagccacccaacagttcctcagacaaagttatcactagtaatagtcttggtattggaagacttcaaggaaaaaatgctattgtaactggcgcagcaggtggtattggattggaaacatgtattttattcgccaaagaaggtgccaatgttctactaggcgatatctcggcacctgcgttggagaaagcttatgcaaaactcattcaagttgtaccatcagctcgtaaagtggagaccaagctgtgcgatgtttcaaaggaagctgacgttaaagcgctggtcgatcaagtagattcatggggaggggttgatattatgtttaataatgcgggcataatgcatgctaatgatgctgatgcaattgatacacctgaaaagatctgggatcttacacaagctatcaacgtgaaaggtgtttggtttggttgcaagcatgcagttctttcgttacgaaaacatcacaaaaccaacggatcgatcattaataccgcttctgtagtggcactcgtcggatcagccacacctcagctcgcttacactgctagcaaaggtgctgttttagcaatgacgcgagaactcgcgattgtccacgcacgtgaaggcttcagatttaatgctctttgccctgcaccgctcaacactccactcctacaggactggctaggagttgatcaaccaaagcgtatgcgccgagaaatacatttcccgagtggccgctttggtgaagcaattgaacaagctcatgcagttgtatttctagccagtgacgaagctagctttatcaatggacaggattttttggtcgatggcggaatgactaaagcttatgttaccccagaaggcccaccgcttaaagcacctacaaataattgttcactttctaagccactcgatactattggaaatattcaaaactcataa

SEQ ID NO: 205 - DNA, 1638 bp, Erysiphe necator
  source 1..1638: mol_type = genomic DNA
atgtttttatcagagaaatgtgacaagttggcatgttcaacagcatcccacactggatcgatatggtctcttgtattatcgctaattccatttattgtgactttcttcggcttagggtctctacttctatataaattgtttcctttaatatctcaaaagacaggtgaatcgcttttcacagtgtcactgccaacatcacctagagattcgccgcttctaagctcaagacatcgatccactacctcgcaacaaaaaagaccaaatcaatgtcgattagacgctttaacatttgcaactactatatctcttgcagctgtattggctgaactcatcctctgtgaaatatcaaatgcactagatcctgtggctcgagcatacgcatttaaatccattataccatcactcttattttccttggtatttctgataccatttcttgaaatacaatcaataatttctgcttcaggatggtcatttaaaaactcggatagtgataagacacctcgagttgccttgctcttacaaatattcggtttctcattatggctaataggcttttggtggcttggaaagggtactcacatattcatgatatcgtctaaatctggccatggattaacagcggcatgcctggaaagagtgggaataattggaattgcccttatggctttgatgtctgggttcgcggctgtctcggccgtatggcacacttttggagtaaagacaaggatagttagtgaagctgatattagccggaagcaagcagatcttgatgccatcaatgaactatttgttgacaaacaaaatcagttacgttctcttcagcgtaagacgaaggatatgccaacagaagactacttgaagaaatatcttggaaatattcgaggaaactctgatactcaagaaattcaaagcattgaaaaagaaatatctgcactttcttatatggcttcaagtttatcttcatctaaagtgcttcttcaaaatcgacttgcatatagccgacgggcatcttcacgtcttggtaaaactgttataatgccagcctcgtttgggttctctatttattgtatctttcggattctaagcactattttgaccaatatccgaatcctggtcttctcttatccaagtatggcagctcacaattcccctaatacagatcctataaatcgcattctttctctcatggctaaacatattgatccaacactaaaccggctggcttggtctcgtcagatatcaatattattatctggctttattcttctcgcctcatttaactcggttctcacaacctttcacatgctaaccaaactttcaccttctcttctacaccaagcgcaggctaaccaagcacttttgatagcacaaataagtgcaacttatgttatcagtagcgctctgctcttaagaagtaatttaccaaatgaaatgaagagtattgtgaatgaagcccttggcagtccacttgatccagtattcgttgagagatggtttgacacttggtttttattagctactgcaggaacagctttaggcatatggactagtcgaagaatttatggacaaggagttcggtcttgggatgatgcagagtttgaagatgatttagagctcggtcaaaaaagactgtaa

SEQ ID NO: 206 - DNA, 2100 bp, Erysiphe necator
  source 1..2100: mol_type = genomic DNA
atgtctaccacgccaaaatgggtccaggatttgaggccatcatcaccgcagggaagtgagcttcttcgggctgaaagagaaaagtctaatctatcaatcgacaatttatccaaatttctcttctcagcagacgtattgaatcgtcgccagaagattttaaaaattcttcaggcggagaaagtgttcgataagtcacacaattacttcgatggtcgagtagatagatttaagacggctctagctagatcaaaaaagttaagacagttagaaatacagcacaaatggactcgtcaggacttactagatgcttctgatcttatcagtgagccagggccatatggacttcatgctagtatgtttttgacaacacttcgagaccaaggaacaccagaacaacacaaactttttctagagccagctcaaaattataaatatattggatgctatgcacaaacagaactaggtcatggctctaacgttagagggttagagactactgcaacttggaaccctgaagatcgcacattcacccttcactcccctcatcttacttcttctaaatggtggattggttctctaggaagaaccgctaactacgcagtagttatggcccagcttgtaattgggggaaagccatatgggcctcatccatttgtctgtcaagtaagggatttaaacactcatcagcctctagacggaatatatgtcggtgacattggccctaaattcggctataacactatggataatggctttttattattcaataaagtcaaaattcctcatgtgaatctgctggcgcggttttcaggtgttgatccggatactagcacatatattcgcccagcctcagcgtctttgatatatggtacactcacatgggtcagatctactattgtgttacagtctggaggtgtgcttgcacgaggtgtgacgattgcacttcgatatactgcagtaagacgccaatttcaagatcgagatacgcatgctccagctcatggagaaaatcaagttcttaattacactatggtccaatatagattacttcctttgctcgcggctacctttgctcttcattttacaggaaaggcgatgatgaatctatacgaaattagtcaaaagaatttgaggcaaaatatgggtaaattagccgataaaaaacacggagtgggaccggaagaggctcaccctggcaccgatcttctatctgatcttcatgcgacctcttgtggcctcaaggcacttgctagtagtatagctgctgaaggcttagaagttgccagaagagcttgtggtggacatggatacagtagttttgcagggattagttcatggtatgctgactacctgcctacagcgacatgggaaggagataattatatgttgactcaacaagtagctcgctatttactgaagtctgctcgggctgtattgagtggaaaatccaataacaacgatacttcaaaaattttaagaagattcctcgataagcaagatacaggtgcagctcatgatatcttatctgttgatagcgacattgtagctgcatttgcctggcgcacagcatatcttacctttgaggccttaaaacatagagatgttgagaaaaagtcatggaattcactgctagttgatttttggcgccttagcaccgctcattctcaatatcttgtcgtgaaaaacttttatgaagtacttcaaagcactagcattgaatatgagcttgatcaaaatactctgatcgtactccatgcagttttccggctttttgcccttcatacccttgagagagaagcatcagagtttttctcgtctggtgctgtcacaattcggcaaatccaattaactagagcgaaagctgttatccaactacttgagcacattaggccacatgcaataaagctagttgattcttggcagttccctgattggcagttagactcatctttaggacgttacgatggtaatgtttatgaagatatgtttcatagagctagtgagcttaatcctttaaattgtctcatagttgacccttatccggaaaacgatactatagtaaaaaagattgataaaacagcttttaagagtaagctgtaa

SEQ ID NO: 207 - DNA, 5844 bp, Erysiphe necator
  source 1..5844: mol_type = genomic DNA
atggcctcgataacttcaattggattatccttaccagcaggcttaccctttgccattcaagaaaaatacctgccgaaagacgcgccaaaaagctcttacacttggaaaaattacacaaaccaagatgttaattgtccatttaataatgatgagcttctagttacccctcgatgtgtaatctggtcgcgaaggggcgtgtttcgaaaatgctataattttgacgtggagaaagagtccatatctcacgccttattgacaacatttccaagcgttggaccacttgctgggaagagggataatcaagaaaaaaaaatcgaagtatctaattctaaagaagcagcaattgtggtctttcttaaaacacaggcacatgtctactttctattcggaacgagccatgttatacatcttccattcgaagtagaatctgcttttgctgctccaaatggtgttataatgcagagaaaactagaggttcatatagtaaatcccgttctaaagacacctcaaacacctcaaaattcctttgtctcatctttacaacaaccatggtcatcaaaaggctctcgacaatcatcattctctatatcggatgttggtgaatctagacaaatttcatttccaccagcaactaagattttttcagaaccatggataacaaatcttgatacaaattggccacgactcttctctatctcagatccgttttctgagattggattgatcgtagcgcagcaaccaatttcagatcgaagtgtatataaaaaatgcttaccagagacttatcatttagatgcggctgaggagttaatacacgtatcctgtcaggaggatttcaaaattggcaacttatcccggtctccagtagttgctgtcacgtggaataaagagaattgtgagtatagtatttggaaacttgattattctgggggaaaagcttgtatagatgatagagcaaagttaatttgtagagatatgtcacgtcgtaggagctcctacgcaccaacaactgctactggaaattcgacgcctcatattatcggacaacaaagtgttagggactcaaactatggtaaaaactccataaaattaagaaagggctttagaattgatgggtcgcaagacaatttcttggatttagtctccgcccttgaacctgactttgaaaatcagtcgatacctagaagaaagtctcgtcgcataagttctatgctagctagggtcgatttttcaaatagtcatgatcgttccactttctctgatcttgtcacttgtccccagcatatcattaaccgacgtggtgggtcgctaggcagccaacatataagaactagccttgggggggttgacacattgagtagcactactctttcacagatatcccaaagtagcttaaacattactatgcttaatgattacttagctgaaaaggctattgacgaaaatcataatggagataattatgaagagtttagctcactcggccttgaaagtgcagaattcaacaccttaaatcaagaaatatttctcactaaaattaggtcagtttcatctgagtgctgttctctccgatactccacagagaagaagccagctcagacccagtgcaaagtttttaccatggcagtaccttctagccctgtggaagatacccggggggacagtaatctcatctgtatcttcgatcatattgaaaaaaagctattcagtattaatttacatacaaaaattgaaaggcctaatgatgatttaaatatatcaaaaaagttaaaatcagaaaatggcgttcatatagtttcattaggtccaattctaagggcagaaaatgtaatagatgcttgcaaaattgatgatggacaaatttctcgtatccttgttttatcagaaactgaaaatgggttcagggaactaactctccaggccccatggagctttattatgaaaattccacttccgattaattttttgagtacaagtttaagagtgtcaaggttccagggagaatgtatagagccacttaggctatgtggtttgcacaactctcggccttcgggttatgttgacttgcttgataatgaagagaatcttcatcaaattcgcattttattacagccccgaaatcctcatgtgtataaaattcttgatacttgcagagaactcttttatattcatggatatggagatcctaactcatccaatcgagccgatggaattttagtatgctggtggagtgtaatgcagtggctgtcttcggagtcacttgatattttcgagccagaatggacggcacttactatcactttattggtaacagccttgggtgtcgattatactgcacagctgtcaaaaagaattaataaaacaaagttgagagattcctctcgatataaagtttcagatataagatctcggaagagtaatgaaagttgggagttaatgttagcagaagagacagggtggggtaacccgcttccctcttggacccaaaatgctggatgggcctggctcgccactgaggctgatgttagtaattctcaagacaatggtagaaaagagcctgtctcaatttttgacagaaatagtgatttaaatgactcttttattcaacgtcatgttaaacttgctcggcaatatttaactaccttgcaagagcaaagattaatgttgcaatgtctacccacttggagcaataagacagttgaagctcgcatgatatctctacaaaatattttcattgggcttcacttgctacgagaagagcaaaaactaaatgttttgacatctgattcttttaatacagggggtgttaacctgacgataattttagctcaagttgttcgatggcttgggtggcctaattggatagatttctataaaaccgaagaagcatcgctatttgattctgattttgatgacgataatccaattaagtccaatatcaaacagccttatgattgcccatctatttacaactggattcagagatccctgatgactagatcgtcttgcccatttataacaataccaaacatgggatgtaatagcattagaatatctgataaatatgcgaatgaattatgttcacgtttaactccaagaaccctaatactaaagaaattttttgacctagtaacacctgattggactcctacacaagttgttcaatcgttttctcaagcagggggggatattcaaattttggataccttacctgaggctattcttgttcctttacaagaagcaataacacggtgccaatcagatccttcatcaacttggaatagtaaattacttgcgttagtagggcgagaagatgtaaatatttcactaactccaggacttaaacctcgagaaattcagccaaaaacttcagtagctccacatgaatctaacatggacgtgcatcggatatgtatggatgtattcaaaccagagacgacaggggtgttcagtggtacagcagaagttgatcgcttgtctgtaactagattaatattcaaagatgataaacgatttaacgaggcggtccaattacttgatactatatctcccactgtcactatttgtgatgcacaaccccaatggagtgaatctgaactactcgaggctcaaaaggaacatgcacagactatagcatatcgaactctagctatttcctcagggagaggattgctttacttcagttctcgtatcccacttctcacgcaaaagtggactataagtggttttaaccttagttgttcaatgaaacctgataatatcgttgttacagctgataaatctgcttttacagaagagaaggtttgctgggctttttttcatgcaggagttgctgccgggcttcagatatcccgtgatgcaaagggcatagacacttcttggatcttgtttaataaacctctttcaggcacgctaaataatcgacatgctggatttttactcgctttaggcttgaatggacacttaaagtcattagccaaatgggtggcattcaaatatttaactccaaagcatacgatgacctctattggcctgcttttaggactagctgcatcgtatataggtagtatggatactttaatcaccagacttctttctgttcacataacgcgaatgcttccacctggtgcggctgatttaaatctatccccgcttacccaaacaacaggaatcatgggaataggtctattatattacaacacccagcatcgacgaatgagtgagattatggtatcagaaattgagcatattgattccgagatagatgagaagccatttcgtgatgaagggtatcgcttagcagctggctttgcccttggtcttatcaatctcggaaaaggctctgatctgaagggcttatatgatatgcgacttaccgaaagattattaactcaagcaactggaagcaaaaaagtagatctcattcatgtgttagataaggcttccgctgctgctgttatgggtattactttgatctttatgaaatcggaaaatcagatattggctcgcaaaatagatatccccgactcattagttcaatttgattatgtgcgacctgatatatttttactccgaacactggcgagtcgtctgataatgtggaggaaaattgaaccttcttttgaatggattcaaagtaatcttccggaagaatatcaaccacgaagcaaactagcctctataagctcactgagtacggaggatcttgcattctataatattgttacgggactttgctttagtatcgctttaagatatgctggctccgcagattttgctgtacgtgatcttttggtctattatctggatcaatttatgcgtatttttggactgaaagcacctaactatgataccaaactaacacaaattactgtccgccattgtcaggacttattagctctctctgcggccacagttatggcaggcacaggtgatcttcttgtctttcgtagactacgatcgttacatggacgggatgatgctgaaacgccttatggcagtcatctcgcggctcacatagccgccggggctctcttcctaggtggcggtacttttacatttggaacttcaaacctagcaattgcctctttacttattgccttttacccaatttttccaaactccgtacacgataatagatctcatctacaagcttttcgccatttttggagcttagcggcagaaccacggtgttttattgttaaagatatcgaaacgaatcagcccgtttctgtacctattatcattataccacgaacaggaagtcaatacaagcgcttaatgagtccctgtttagtccctgaattggatcaaatcaaaatcattcgtacagattcatcagatttttggaatttatcccttgatctagaaactaaccatgcacatatgacagtgttcaagtcaactcaaaccatctatgttagtcgacgtccagcgcatttgtcagccgtgaatccatttcatgcaagctttttagctcttagtgacgcagaaaataatttaagtcatcccttggaatggatttttaatctacctgctttcaagtctttatctaaagctgaaagagctctggttctcccatcctctacgacagttaacggtgttagtgaccgagacattgatgcaagaggtaccgttgtagatgttagactagtacttgagaatgctgtattggaaagtgggaagaaagatcgactgttgggactgaaattactgtttgattgggtagatcgtgctgctagcgagaatcgtaatattctatggatccgcaaagaagtagtagaacgattgaagactaaaatgtggataatgataatgaatatgtcacggaatgataccaattaa

SEQ ID NO: 208 - DNA, 2709 bp, Erysiphe necator
  source 1..2709: mol_type = genomic DNA
atgcttctatctcattgcaacatgctgagtcctaatattctttctcatattcttcctactagagctacaaggagatctatttatgaagagctccgtgctcatgacgctgatgaacacggctccgatattgaagcacaaacaagactaactttagatgaagagaatcttcaacttcagggccatgaacttgattatctcaatatgactgatgatagggagagtcctaatgcggtagagagtacacacttaatctcacattcgaacagctcctcaagagctgaaaatgtctataagggggagaataaaattactcaaccaaaatggatgatccagtctcctcggttccttcctgacgatggtgatgaagatgtacctgcttctcttcttgtagaagaacaagaaatgacgggcccatctacgatcaaaaacataccaaaaaaaccaacaaaggctaagaagcattcagctcagtgggagttctctccaactcaaaagaaaatgcaggccaatattattggtaaaccttcccgaaaaattggttttgtgacaagtaatgctagggaaaaagcgttgtggcattggataaacattacaaatctagataactttataagagatttatatgactactacactggagctgggatttggtgcattttacttgaacgtacccttaacctcgtacaagttgtatttgttgcatccttcacaacttttcttactcaatgtgtcgaatttcaaaatattccaggaagcaaaaaattatcagagattttggtaccacagtgcactaagaagatatctggaatagcaagtctagctatatggctttttacttttcatgttttctggagagtctgtcaacttatagcagatattccacatttactacgtgttcgagagttctacatctttttattagagatcccagagattgatatgcaaacaatctcatggcaagatgtggtagctcgcatcatgacattgagagatgcaaaccctattacggctgaagatatacctccatcgaatagacgattcataggaagccagtctaaacagcgacttgatgcacacgatatagcaaatcggttgatgcggcgggaaaactatctgatcgcactatttaataaggatattttagatttgacattgccaattccttttctaaaagctcgtcaattattttcaagaacgcttctctggaatatagaccaatgcattatagatctagtatttaatgatgaagggcaggtgcgccaagtcatattaaaagaatctcatcgaaagcagttgagtgatgctctacgacgcagatttatgtttgctggctttatgaatgcattgttagcgccaatgataattgtatacttaatgattgtgtatttcttacgatatttcaatgaatatcagaagaatcctgccgcagttggatcacggcaatatacacctcttgctttgtggaaattccgagaattcaacgaattgcaacatttatttgaaaagcgagtaaacatgtcatatccatttgcttcaaggtacttggatcaatttcctaaagtaaaagtgactcaagtagctcgttttgtggccttttgtgcaggagctatagtttcagtgctagctgtgctcaccttctgggatccagaaatgctcaccaacttcgagataacgagtgatagacctgtggtattctacattggtgtactgggtgctatctgggcccttacaaatggcatgttacccgaagaaaatctagttttcgagccagaatttgccctacaaaatgttattgattacattcactatatgcctaatcattggcataatcgtcttcacagtgatgatgtaaaaactgaattcgcccaactatataagctaaaaattgtgatcttcattgaggaggtctttagcattattttcacaccttttattctctggtttagtcttcctaaatgcagtaacctgattattgacttttttcgcgaatttactgtgcacgtcgatggagttggctacgtatgctcttttgctgtctttgatttcaaaaaaaatggtcgatgtaaaccgcgagaacaagcttcaagagccacggatgctcgggaagactattattctactaagcatggaaagatgaccgcatcttattacggcttcatagataactacctcctaaaccctaggtctacagcccgaggccatattccccttgaaattcgacagaaatactatccaccgcctccatttccagggttgatgtcgcctgcttttgcccctgaaatacaaaattcccgcgtaggacgcagcataaaacgccatggaagctgcgcatcacaattacgtcctatcaataagcatatcatttctcctctgcattcaattcttctggatcctcaccaccagccctcaaattcgggttctggaagacttacttcccgtcatcgaaatcgaacacgacaaataatttctaaagaacccgctggagctgaaaatcagttaagatttaaatctgaaaggaatattcctaaatcgcagccgtatgaaagtgttatgggactcggagaatctcgctgggaaacatcacctccgagaactgatattagtaaagctggagaggaagacgaggatttaactagtgctggtgtacttggcatgttgtaccagttccaaagaactcataaagatggtaaatgtggagttgacatatga

SEQ ID NO: 209 - DNA, 792 bp, Erysiphe necator
  source 1..792: mol_type = genomic DNA
atgactataactaagattaactctgcgccagctttggacgactttacaccccttgctgaacatcaatcaaaaactccagctacgttctataagggaaagccagtactatactttcatgatactcaggccaaggctattatcaccaaaaatcatctcacaaaattacctctcaatgggactgactcttatgaggttaaacatccttctgcttcaagcttaaatatagtagagttatttgtttgttcagaaaacttaaccttttttaatccgtctagttgtattggttttgctattccctatccggctataactcttcatgctattaaaacgttaaaagaccctgaagattcatcgcaagaaatacagggactttatatgcaaattgaaatctctgattattatgatcatgaggtacaggaggacgatgactcaggctatattgatttaaccttaattccttcatcaagctctaatgaaggcaagtctatcatacaaactctcttcgaggccgtctcagcgtgctcagatttaaatcctgatccgaactctgaagatgaaagaattattgatcatatcaatcgagatgatacaggaattgaagggaatgtttttaatatgggcataaatgagcttgcgagtataccgattacatcatttgatgacaatcttccacctccattcccaggcagtggaggatggatcactgctgataatatctctcaatatctagatgaaaatggtgtttggattggcactaatgcgaatagtgaggatccaatgatcataggatga

SEQ ID NO: 210 - DNA, 543 bp, Erysiphe necator
  source 1..543: mol_type = genomic DNA
atggattctatgagtgacatgacaatgggtggtatgcatatagatgatgatcgaccgaagaactcaatgtcatcgatgagcagcagcaacatgtcaatgggtggtatgtcaatgggtggtatgtcaatgggcagcatgactatgagtagcatgtctatggtttttttcaatagcataaagacgacgttatacatgagcatgtggactcccaataatatgggcagttacgcggcgacttgtatttttctcatatttctcgcaaccggccatcgattcttgttcgctctaaagtcaaggctagaggcttattggtcagatctcgatgttaatcagcggttagctgtaacaagtggaaagcttcctttatccgaacgcattgctatggacccgagtagtaggaaaatggtcttatctgagatgggcgtggaagaagacgtaattgttattcagaagagaaagctatcaactccatggaggctcactgttgatccaattcgagcaatattggataccattatcgccgccgtcggcttctttctgtaa

SEQ ID NO: 211 - DNA, 1917 bp, Erysiphe necator
  source 1..1917: mol_type = genomic DNA
atggacgcgcgacctcaacgatcgattcgcattatgcgttcacatccagatgaaaattgcgctcctgctatatgtaataatcagtatttacatcaccgtcagaaatctgcaaatcaaatggcaacgcttccagtcggtggcctcaaagctacagcgaagcggacagcctttggagatgttagcaatacagtaaaaaatctatctaactcgcaagatgacttacgtcgaactcaaaatgaattcaaaagttccgatatacaagagaaatctaatttcttcaaaccaacaaagaaacattttgctatagccgccaccaaaatatcgaaaaacaatacgaaaacgaatatagatatcaattatcttgggacttcctctaaagctgccccctccaatagtcatagctctattagacgaacatcttcgatgcgtagtacatctatttatcaagacgccattgctaagaataaaacagttgcccaaaaccaagtgtatagatatgaatccactaaaagtggcattgctgcccaatatgaagctagagatcatcatgaagggattcaaatgtgctcagcttcaatcaaccctaattataaaaaatatgggcattacctgccggagacttttaaaaagatcactaccagccatgacatttctgaagaaaattccgaagaaaaagtgatcgcctcaaatgagacatttcatacggctagagaaaacctgattgaagatttatgcagtgatgataaaaattcaatagagtctgaaacagatttagcgcaaaatcaagtagataagccatccttgtcttctcttctatctgactctgaaaaagatgacgatgatgatgagagttacgacgatcagggtcacttaacgatgtactcatatcgatcctgtggtgaaaatacaacaaacggggctaccacaactctttatcccaaagtcaccaacaaaatcaagcaagagcttgagtctgcaaagaaatttaccgaagaaattcggaccattgaggatattggagatgaaatatgggataccagtatggtggctgagtatagcgatgaaatattcgcttatatgcgagagcttgaaatcaaaatgcttccaaacgcgcactacatggatctccagaccgaaattcagtggtcaatgcgctcagtactgatggactggttaatacaagtgcatcatcggttctcacttcttcctgaaacattgttcctttgcgttaactatgttgaccgttttctgtcaagtaaaattgtttcacttggaaagcttcagttagtcggtgctacagctatatttgtcgcggcaaagtatgaagagataaattgtccatcagttgatgaaatcgtttatatggtagacggtggctacacagtggatgagattttaaaagcagaacgatttatgctcaatatgctccaatttgagcttggctggccagggcccatgagcttccttcggcgggtcagtaaagcagatgaatatgacttggagactagaacattagcgaaatatttcctcgaggtgaccataatggacgaacgctttgttggcagtccacctagctacatcgctgccggttctcactgcttcgctcggctgctactcagaaaaggggattggactaaacagcacgttcactattctggatacacctggacacagcttcgtccattagttgctatgattaaagagtgctgtgaattccctcaagagcatcataatgcagtgtttgaaaagtactcagatcgaaaatacaaaagagctgcccagtttgtttacagtgagatcagaaactttagtttgccctctttacaaccttataaaccgtcccttccatccgttgagaatattgtgcagaatcctcatcacaagcaagagctcctcaatcgactagtcaaatcttag

SEQ ID NO: 212 - RNA, 199 nt, synthetic construct
  misc_feature 1..199: note = Inhibitory double stranded RNA
  source 1..199: mol_type = other RNA
tacgtgaagaagtgtcccagcttcaaaggacaaaaaggcaccgttaatataactgaagttatggctgaaatcactatctacactgcttcgcatactctacaaggaaaacaggttcgtgacaggtttgattcctcttttgccgctctctatcatgacctcgatatggggttcaccccaattaattttgtgctgcattggg

SEQ ID NO: 213 - RNA, 344 nt, synthetic construct
  misc_feature 1..344: note = Inhibitory double stranded RNA
  source 1..344: mol_type = other RNA
acctctgctggttctatctctgcttttaacttattagtcgccaaagatggtgctttatcttataatggcaaaccgctattccgtgctgctattatggacagtggtagcatcgtgcctactgatgcggtgaactccccgaagccacaaaatgttttcgatcaagtcgtgagtgctggaggctgtagtgaagcatatgacaaaattagctgtctacggaatctcgactacaccgagtttttgttcgcaagtacatcagttcctggtctatttgactaccaatcagtagcactttcatacatcccgcgacctgacggtgatcttttgaccgcatctatggatgaatt

SEQ ID NO: 214 - RNA, 278 nt, synthetic construct
  misc_feature 1..278: note = Inhibitory double stranded RNA
  source 1..278: mol_type = other RNA
ctcttacgctcattctcacgtatatttcatcgtcgaaaaggaagtaggccagaaagacatatgcactctaacattgaatgtacgaactgcactgttcatatgggattttggacaagctaccaacaaatacgtcctcatttattctccaagattagtagccttcgaaaaaaattccctaactatcgattggatttagtcggacactcactaggtggcgctgttgctgctcttgctggacttgatcttaaattacttggatacgaacctatcgtaacaac

SEQ ID NO: 215 - RNA, 303 nt, synthetic construct
  misc_feature 1..303: note = Inhibitory double stranded RNA
  source 1..303: mol_type = other RNA
atgctaccaccaatccttccctcaggatacgctaggttgattgatattgccgtagcgtacggaaaagctcagggtggtactacagatgaacagacagatgcctatcctcgcagctacaagaaaccactctcgaccgattgttagttgagtttggcaaagaaatattaaatgtagtacctggaaaggtctcaactgaagtcgatgccgcgttctccttctcaatcacgggttctgtagaaaaagctctacacataattaaactttataaatctatcggcatcgacaagtctcgcattctcatca

SEQ ID NO: 216 - RNA, 205 nt, synthetic construct
  misc_feature 1..205: note = Inhibitory double stranded RNA
  source 1..205: mol_type = other RNA
cagatggctaagtatttagatactgtctatgtttctggctggcagagctcatctaccgcctcggcatctgacgagcctggcccagatcttgcagattatccttatacaactgtcccaaataaagttggtcatcttttcatggcacaactattccatgatcgcaagcaaagagaagagcgtatttcaaatatgttatctgcagacc

SEQ ID NO: 217 - RNA, 206 nt, synthetic construct
  misc_feature 1..206: note = Inhibitory double stranded RNA
  source 1..206: mol_type = other RNA
cctgggataatatgattaacggacaggttaatttatatgatgccattcggagaaaaattcatttcaagcaagggcaaaaggaatataaactccggaccgaccgcacattaccaactcttattgttagacctaggggttggcatttagacgaaaaacatataattatcggagaagagcccatttctgggtctctcttcgactttggc

SEQ ID NO: 218 - RNA, 196 nt, synthetic construct
  misc_feature 1..196: note = Inhibitory double stranded RNA
  source 1..196: mol_type = other RNA
tacctttcgatataactcaactgtgtcatgcctaaaaacagtattctctaatcggcttgaagaaaagcgagagctagcgaagaaagtcagagcggtcggagataaaattgtgggaaatgttaaggttgccaatatttacggcggtatgagaggactaacgtcgatgatctgggaaggatctactctagaccctaat

SEQ ID NO: 219 - RNA, 230 nt, synthetic construct
  misc_feature 1..230: note = Inhibitory double stranded RNA
  source 1..230: mol_type = other RNA
gtgactgatgttaagaaaggcgactgggtggtggcaaatacccctgcactcggcacctggcgtacgcatttggttgtacagaagtctgatattttgcccgtagagaaaaaagggttaaccgcaacacaagtttgtactgcatcgatcaatccgcgaacagcttactgcatgttgaataacattgagaaactgcagaaaggtgattggtggattcaaaatggagccaacag

SEQ ID NO: 220 - RNA, 341 nt, synthetic construct
  misc_feature 1..341: note = Inhibitory double stranded RNA
  source 1..341: mol_type = other RNA
ttctacgaggaactaggtatcgatgacgtctatttcgaatccgagagcgttgaggcgatttcccgtctcgtcatttcactttatgccgctaaaataactgcctgggctcataaagaaaaaaggcaagatatcagactagatatggaagctaatgaccacgcaatttatattgataccagcgagcctggtgttagcagtatcgatgggtcacgttatgaacagcgattggaatctaaatatcttgatgcctctgcatcttcagacacatgctatcgcgtcgaaacgtttcggtcaactacgagtctgcccggaaaatttgagacaaactctactatgcgttg

SEQ ID NO: 221 - RNA, 263 nt, synthetic construct
  misc_feature 1..263: note = Inhibitory double stranded RNA
  source 1..263: mol_type = other RNA
caaccaccgtatgcaattctttgcgatcatcgaagtcatatttttcaatgggaagcgggcggcgttgcaagtctctgcggtgcacttgtcaaaactgttgtaccagcaaacggtgagtatcttactcgggaagatattgagagtaatgttgtgcttggtgatgatattcatagtacgcctactcgggttatatctcttgaaaatacactgggtggcattgtaataccgctagaggagacgcgacgtataacgaattttgctcg

SEQ ID NO: 222 - RNA, 252 nt, synthetic construct
  misc_feature 1..252: note = Inhibitory double stranded RNA
  source 1..252: mol_type = other RNA
ttctcgggcatatagggttaactccgcaacgacaaaattctttgggcggcttccgagtacaaggaaagacctccaagagtgcactcaagattcttgaggatgcattagccatacaggaagcaggctgttttgctgttgtgattgaggctatacccgcagaggtagctaccataattacaaaggaactttcaatcccaactatcggtattggcgctggtaatggctgttcaggccaagtactagttcaggttg

SEQ ID NO: 223 - RNA, 234 nt, synthetic construct
  misc_feature 1..234: note = Inhibitory double stranded RNA
  source 1..234: mol_type = other RNA
cggcttgattctacaaatgtcatggagcaaaagactgtaacagttatatctaaaattggactagatcaccaatcctggcttgggaacagtattgagcaaattgctcgtgagaaagctgggatcatgagacccggtgttccgtgtatcttagacaaaagcaacccaacgacagtaagacgggctatcatggaccacgcaagagaaattggaactgaagtaatcctcagctcaact

SEQ ID NO: 224 - RNA, 256 nt, synthetic construct
  misc_feature 1..256: note = Inhibitory double stranded RNA
  source 1..256: mol_type = other RNA
cgacctcctccattcctctggtagaagcaggaataaagatttgggatggaaatggaacccgtgaatatcttgattcggttggtttatctcatcgtgatgttggagatcttggtccaatatatggattccaatggcgtcattttggtgccgactacgttgatgctaacactgactatactgggaaaggggttgatcaactcgctgaagttgttgcaaaactcaagacaaatccatatgaccgccgcattattcttac

SEQ ID NO: 225 - RNA, 296 nt, synthetic construct
  misc_feature 1..296: note = Inhibitory double stranded RNA
  source 1..296: mol_type = other RNA
cagtcaagtattgtacggtctttctttaaggtacgcatggctggggatgtactccagatccggaaaaggcactcaaataccttcagctgcagcatcgtgtgcagcctcaatcgaggatttagcacttagggcggggaagaaaagtggaggagcagcgaaagatgaattagttcttgctatttacgagctcgcaaatagttttagacatggctggggaattccgatcgaccgagtggctgcgaaacagtactatgagacggcagctaatttgggtgatacggacgctatgaatgaag

SEQ ID NO: 226 - RNA, 284 nt, synthetic construct
  misc_feature 1..284: note = Inhibitory double stranded RNA
  source 1..284: mol_type = other RNA
tccgaaggagagtattcatcagaaactcaggtttcagaatactcggacgatcaactcaactctgataatcttgaagatgaagaatctgatagtgatgatgatgatgatattggagatgaaagaaccgaacgatccgaaattcagaaaatcatgaaagaagatcaaaagaccgtggtatcaacaatatctcaagcagtaaaagcagatgttgaaaagggtaaagctgtcaaggctcagcgaatgagattcgattgtttgttaaatgtacgaatggcaatgcaaaa

SEQ ID NO: 227 - RNA, 370 nt, synthetic construct
  misc_feature 1..370: note = Inhibitory double stranded RNA
  source 1..370: mol_type = other RNA
gtcacagtgtacctccaaatcaaccaccccatattacaccccaaactgcgcctcaacaatggcaagggacacctcaacacatccggccgccctttactggccatcgcggccgtggcggctttagcaatagtggacgaggaactcacgaatcacctgctctacttatgggtcctccaatccgaatgggctttgataatgatcgtggagggggccatatggctcaagcgagcaatggcttcacacattcacacattagtcatcatcctcctgctactttccctcagcctccttttcacagctatccaccgcaggattttccccaagcaattcagcgactgccaagcgatacgaaccagtattcctctcctca

SEQ ID NO: 228 - RNA, 202 nt, synthetic construct
  misc_feature 1..202: note = Inhibitory double stranded RNA
  source 1..202: mol_type = other RNA
cacaaaatgggccaaatgggaaattgtcgagctaattgtgattggaaacgaagccctatttaatggccatacttctccagatgagctcgcaagatttattagctcaaccagaaatacactacgatcctctggttacaatggaccttgcacaacagctgagcctctcaatatctggcagcaaagctcggatgtattgtgtggt

SEQ ID NO: 229 - RNA, 233 nt, synthetic construct
  misc_feature 1..233: note = Inhibitory double stranded RNA
  source 1..233: mol_type = other RNA
acagagaccgtaaccgtaactgtctgtgcaccatctgcctctgcccatccctcttcgggatatgctatgccatcagtctatccggcaccagtttcatcagaccctgccagtcctgcatacccgccaagcgcttctggtggctactcctctccaccaccaaaccaaactccagcaccattcaccggcgccgcttcagcaaacgcagctcaggtagtatcagccattattgctgc

SEQ ID NO: 230 - RNA, 223 nt, synthetic construct
  misc_feature 1..223: note = Inhibitory double stranded RNA
  source 1..223: mol_type = other RNA
cacaacagctctcctaatctctccctccctaggagttaattcagctcagaacggcgaaactcccgatgacgattcattaggttctacgaaacacatgaactttggctctggtctctctgaattcaatgctcatgaagatatgtatgttcctgccatggatctgaatgggtttagaataaagcgacgacattttcaaaatgaaggctattactgcagcaaatcg

SEQ ID NO: 231 - RNA, 280 nt, synthetic construct
  misc_feature 1..280: note = Inhibitory double stranded RNA
  source 1..280: mol_type = other RNA
atgtactcaggccctacaagctattcccaagtgcgctctgagctgcatcacacaacccccaatcgacgccggatgcaaatcagctgctgacttcgcttgcacctgtgagaaaaagacccaaaaacaaattacaaaggcagaaactccttgtgttctcaaagcttgcggactaaaagaggcacttgctgcttcaaaggctggaaaagctgtatgcgaggcttgcaacacatccccaagtgatccatcagacggtcacggtgacgacggagatgacgattca

SEQ ID NO: 232 - RNA, 228 nt, synthetic construct
  misc_feature 1..228: note = Inhibitory double stranded RNA
  source 1..228: mol_type = other RNA
taagcctgtcgaacaagtacttaatgacgcaaaagtcaaaaaagcagaggtcgatgatatcgttcttgtcggaggttcaactcgtataccaaaagttgtggagctcattgaagagtacttcggtggcaagaaggcttccaagggtatcaacccagacgaggctgttgcatttggcgctgctgttcagggtggtgtcctatcaggagaagagggtactgaagaattggt

SEQ ID NO: 233 - RNA, 267 nt, synthetic construct
  misc_feature 1..267: note = Inhibitory double stranded RNA
  source 1..267: mol_type = other RNA
actgctcatagtaatcctatcctatttgcccggctcgactcaggtgatcaaaaggattagtgtagctaacaccaatatcttataccatgatggacgggctttggcgacctgcgaaagtggcccaccaatgagagttgttctccctcatctggatacagtcggttggttcgatgggctgaaggtagggggagaaaaggctaccgatgaatcggacggtcaatcctttgcgaaagaaggaacctttaatgtattggatggacggacaac

SEQ ID NO: 234 - RNA, 261 nt, synthetic construct
  misc_feature 1..261: note = Inhibitory double stranded RNA
  source 1..261: mol_type = other RNA
atctcactcaggctatcaacgtgaaaggtgtctggttcggctgcaaacatgcagtcatctcatttcgaaagcataaaaagtcaaagggctgtgtcatcaatacagcctctgttgttgctttggtgggatctgcaactccacaacttgcctacaccgcgagtaaaggagctgttctagctctaacgcgggagcttgcaattgtacatgcacgcgaggcgccgttgaacactcccttacttcaggattggcttggagatgacc

SEQ ID NO: 235 - RNA, 201 nt, synthetic construct
  misc_feature 1..201: note = Inhibitory double stranded RNA
  source 1..201: mol_type = other RNA
acttgcacttagtcgaagagcatccacccgcttaggtagacttattctagtaccaatatcacacggcttttctatatattgtatctatcgcatcatatcaacaattctgagcaatgcacgacgtctgacatactcctcacccgccccaaccatctatagccctccgagtacagatccaataaatcgcatactttcccttgt

SEQ ID NO: 236 - RNA, 292 nt, synthetic construct
  misc_feature 1..292: note = Inhibitory double stranded RNA
  source 1..292: mol_type = other RNA
aagcagtatggtcctcatcctattgtgtgtcaagttagagatttaaatactcatcagcctcttgagggtatttacgttggagatataggtccaaaatttggctataacacaatggacaatggatttttgttgttcaataaagtcaaaattccccatgttaacctgttagcaaagttctcaggtgttgatcctaataccagcaagtatattcgaccatcctctgcttctttggtatacggtacacttacttgggtgagatcaactattgttctacaatctggaagtgtgcttg

SEQ ID NO: 237 - RNA, 269 nt, synthetic construct
  misc_feature 1..269: note = Inhibitory double stranded RNA
  source 1..269: mol_type = other RNA
agattggtattatctcgcctgaatatgcaacgtttagaagttctattcagacaaagccgactcttaatcaacgcaaggtttttacggtggcgccgcccttgtgcgcttctgacgatgtacaggagaattcttgtattatttgtatccttgatcctaatgaaaagaaacttattactgtaaatttaaatatcaaggcctcggagcaaaaaagtgaactcgcaaaatcggaaaatctaaaatctaagaaagaggcaactacagtgtcactt

SEQ ID NO: 238 - RNA, 344 nt, synthetic construct
  misc_feature 1..344: note = Inhibitory double stranded RNA
  source 1..344: mol_type = other RNA
cgcagagttacataatgagatgtttagaaaatcttcactcagtcgacgaagctttggccgggtaactggaaatgctagagaaaaagcgctatggcggtggattaatataacaaatttagataatttcataagagatgtttatgattactacaccggtgctgggatatggtgtattttgcttgaacgaaccatcagacttgtacaagttgtatttgttgccgtatttactaccttcctgactcaatgtgtttattttcataaaattccgattagcaagaatctatctgagattttggttccgcaatgcactaagaagatttctggcatctccaactttgccattt

SEQ ID NO: 239 - RNA, 244 nt, synthetic construct
  misc_feature 1..244: note = Inhibitory double stranded RNA
  source 1..244: mol_type = other RNA
atccaaacactctacgaggcggtctctgcctgttccgacttaaatcctgacttgaatccggaagacgatgggataactgaagatgtaggtgaagaatctaggataatatttgaaggcactgatggtcttcctggtgttttcaacggcggatcagatggcaacctcccaccgccgtttcctggtagtgggggatggataacagctgagaatatgtctcaatttttagacgaagaaggtaattgga

SEQ ID NO: 240 - RNA, 225 nt, synthetic construct
  misc_feature 1..225: note = Inhibitory double stranded RNA
  source 1..225: mol_type = other RNA
tcggcaaatggtactatctggaaatggttttgaagaagatgtgatagtcgttcaaaagaaaggattccgtgtacggccctggagtattactgtggatccaatccgagcgctgatagacaccacaattatggcagtgggattattaataatgctggccgttatgacaatgaatattgggtattttatatcggttttgataggcacatttattggcagcctagttgt

SEQ ID NO: 241 - RNA, 208 nt, synthetic construct
  misc_feature 1..208: note = Inhibitory double stranded RNA
  source 1..208: mol_type = other RNA
aattcctgaagttccagccgtccccgaagttcccgctgttcctgaagtacaaaagcgtcaacagacgataactgttcccacgatccccacgattcctaccgtgccagatgttcctgctgacacacgaataaagctgtccacaaactcaatggctacgccaaactctatgctggacaagagacctgaagtgtggcatatccatgataac

SEQ ID NO: 242 - RNA, 253 nt, synthetic construct
  misc_feature 1..253: note = Inhibitory double stranded RNA
  source 1..253: mol_type = other RNA
caaactgacgagaactgtgtacctgcagctcaaaacaaacaactcttacgttaccgacaaaagtcttctaatcaagtcgctctactacccgtaggtagactcaaggctaccgcgagacgaacagcatttggtgatgttagcaatacagttaaaacactttctaagtcacaagaagacagtggccagcttcagaataacttagacaagttcgttaagttacatgaacaaaaatccgcttcatgtataaaacaaa

SEQ ID NO: 243 - RNA, 214 nt, synthetic construct
  misc_feature 1..214: note = Inhibitory double stranded RNA
  source 1..214: mol_type = other RNA
tttccggatctggtaccctaggatgggatctagtagccgcaaatttagcggaacgcggtgatgatgtcttagtattacacacgggttactttgcagactctttctccgattgctttgagacctacgggataaacgtcacacagcttatagctccgattggttcaagaccccaactaatagagattgaagaagaattatcaaaaaagacctacaa

SEQ ID NO: 244 - RNA, 248 nt, synthetic construct
  misc_feature 1..248: note = Inhibitory double stranded RNA
  source 1..248: mol_type = other RNA
tgtcaacgccgaagagatttacactaatttaacaactccggtctttggaagagatgttgtatttgattgtccaaattccaaactcatggaacaaaaaaagtttatgaaaacggctcttaccattgaagcgttccattcctatgtaacaataatacaaaatgaagtagaggcatatataaacaattgcgttagctttcagggtgagagtggcacagtaaacatctcaaaagttatggcggaaatcacta

SEQ ID NO: 245 - RNA, 298 nt, synthetic construct
  misc_feature 1..298: note = Inhibitory double stranded RNA
  source 1..298: mol_type = other RNA
attaatactggtgctgtacagcgcctattacacattaatgaggactgtttaactgtcactgttcaaaaaccatcatatgcgactcccgactctaagtttcctgtcgtgttctctctattttttggagggtttggttttggttcaacggcaatatatgatgcctctaaacttattcaagcaggtatcaatgcaggtaaacctatcgtctacgttgctgtaaattatcgtttgggtgcatttggatggcttggaggaagagaaattaaagaggcaggtctcgctaatcttggccattacg

SEQ ID NO: 246 - RNA, 251 nt, synthetic construct
  misc_feature 1..251: note = Inhibitory double stranded RNA
  source 1..251: mol_type = other RNA
atttacgctctggagactccaatagccagacaaatttcccaagtagcaaaagccgttatcgacgcgtaacacactttagtgatccgtttccattacttccaatggaaaaatttggctatcgctcccatgctggtgaaatctttatctccaaaaaaaaagtaccaccggctgtagaaaacgtgcgactttgcttcggtgatgacgatatgaactgtatcgcaggaaaagatacgtatgagacttgggaggaa

SEQ ID NO: 247 - RNA, 321 nt, synthetic construct
  misc_feature 1..321: note = Inhibitory double stranded RNA
  source 1..321: mol_type = other RNA
atgcatgatcgaaaacagtgggacactcgaagaaaatggtcagcagaagagcgtgcaaggattccatacatcgattatttgcgacctataattgctgatggagatacaggccatggtggactttctgctgttttaaagctttcaaagctttttgctgaaaatggggcagctgcagtacattttgaggatcaacttcatggcggtaagaaatgtggacatctttcaggaaaagttctagttcctataggagaacatatcaatcgtttgctagctgcaagatttcaatgggacctaatggggactgaaaatctcctcatcgct

SEQ ID NO: 248 - RNA, 366 nt, synthetic construct
  misc_feature 1..366: note = Inhibitory double stranded RNA
  source 1..366: mol_type = other RNA
atctattaagtcgagagtagatcgccaaaaattgcctaatatagattatcttcgtccaatcattgcggatgcagatacaggccatggagggttaacagctgttatgaaattaacaaagttatttattgaaaaaggtgctgcaggaattcatattgaggatcaggccgctggaaccaaaaaatgtggccatatggccggtaaagtactggttccgatcagtgagcatatcaaccgactagtagcgattcgagctcaagcagatattatgggatctgatttacttgctatagcaagaatagacgctgaagctgcaactctcattacctcaacgatagatcctcgtgatcatgcctatattctaggctc

SEQ ID NO: 249 - RNA, 321 nt, synthetic construct
  misc_feature 1..321: note = Inhibitory double stranded RNA
  source 1..321: mol_type = other RNA
tacaagctcagatcagaccgaaaacttccaacgcttattataagacctcgtggctggcacttagatgagaaacatgtaactattgaaggagagccaatatccggctctctattcgattttggactatacttttttcacaatgccaaagaactgataaaacgagacttagggccctacttttatcttccaaagatggaatcttatctagaagcccgtctttggaatgatgtcttcaacctagcacaggactatattggtatttctcgtggaactatacgcgctacagttctaattgaaaccatacttgctgcatttgaaatg

SEQ ID NO: 250 - RNA, 300 nt, synthetic construct
  misc_feature 1..300: note = Inhibitory double stranded RNA
  source 1..300: mol_type = other RNA
tgatagcgatcatgatagatgcgactcaaattttagtaataggaatgacaaagagattattaaacggtctgaaattcaaagatttatggaagaagatcaaaaagcaatattatcaactttatctcaagcagcaaaggtagatgcagaaaagggaagggcaattaagtcacaacaaatgagattcgattctcttctaaatacgcgaatggagctgcagaaagctctgatagcagttaattctcttactacctttcaagatgataattctattttctccaaggataagccatacgaagcagc

SEQ ID NO: 251 - RNA, 220 nt, synthetic construct
  misc_feature 1..220: note = Inhibitory double stranded RNA
  source 1..220: mol_type = other RNA
ctgctactagctttcatggtatgaaactcattattggtgtttttattggtgaaactggttgctctggcgctaaagagcaggtgaaccacatcgttaaatggggtaaatgggatttggtagaactcattgtgatcgggaatgaggctctgtttagtggtcatgcgtcacccgaagagttagccgaatttattacctcgactaaaatcaccctcagatcagc

SEQ ID NO: 252 - RNA, 252 nt, synthetic construct
  misc_feature 1..252: note = Inhibitory double stranded RNA
  source 1..252: mol_type = other RNA
tgttatggctactgagactgtaactgttactgtttgcgctccttcagctacatatgtaccatcccaaggatacgccgcccctacagcacctgcctatgctcctattgcatctggttcacccgctgtcaatatgccaggcgctccttctggaggatacgccccacctgctcaatcacctgttccattcactggttctgcctcttctcacggcgtctccagtctttctgcacttattgttgctggatttgttgc

SEQ ID NO: 253 - RNA, 245 nt, synthetic construct
  misc_feature 1..245: note = Inhibitory double stranded RNA
  source 1..245: mol_type = other RNA
aaacgattcctaaatgtgctattagttgcattgttcaacctcctattgatgcgggatgcaagtcagccgccgactttgcttgtacctgtgaaaaaaagacgaagaaagccataacgaaggctgaaaccccttgtgtattaaaagcatgtggattaaaagaagcattagctgcttcacgagctggtaatgcagtttgtgatgcttgtaatgtatccccaagtgatccatctcctagtgatccatct

SEQ ID NO: 254 - RNA, 287 nt, synthetic construct
  misc_feature 1..287: note = Inhibitory double stranded RNA
  source 1..287: mol_type = other RNA
acagcctatgaaaaggatcagtgtggcgaatactaatattttatatcacgacggacgagctcttgcaacttgtgaaagtggcccaccattgcgagttttacttcctcgtctagagacagttggatggtttgatggttacaaagtggaaggggaaccggcaacagaaaccaaagttggtgaacccttcggcgttagtgtgggaaacttcaacatattgacggaacgaataaccgcgcaccctcgagaagatccaatcacaaaagagctcattcttttccactcaacgt

SEQ ID NO: 255 - DNA, 1203 bp, Golovinomyces orontii
  source 1..1203: mol_type = genomic DNA
atgccgtctatccccatcactatcattactggctttctagggtctggtaaaacaactctccttctcaatattcttcctcaaatacttgccaagaatccgaaatataaattagcgcttctcaaaaatgaatttggagatttggctgtcgatagtcaacttgcaggctcttctatcactggtgttcgtgagattctaaatggctgcatttgctgtaacctcgtcggctctctctcatcggcccttgaggagctcacagagagtatttctcccgaccgaatagtgattgaaacgtctgggtcagcattccctgcaacgctagctatggaggttaatcgactagcgcgggagacccagggtaaatatgttctagatggtgtagtgactgttattgatgtcgaaaactggaagggatatgaagatactagctttaccgcacgattacaagctcgttacacagatcttgttgtttttaataagtgggaggatgttggtgaaaggaggtgggacgaatgtttagatcgactgggtgatatggaggttgaaattccatgggttaagagtcagaggggatttgttgatatggatattatctttggccttgatggaggactagcaaaagaattagagggagaagtagagcaaggcctacatcagcaaaaaaaaacgcacaaggacggcgaaagtcaccagaacgaggttgaggtactttctgtcaccctttctaaaaaatctgatatctcctcgaccattacacgtccgaattcagagcttaccccaaaaattgatactgatgctctgctgaaacttctccaaacagcacccaaggacgaggtctaccggataaagtcaatctttacttcttctacacctatgccttcatctactcctatatcatcttcagatctatcagaaacgccagtgtcttcagttgctggcccaaataaatacattctaaattggtcatttggtcgctggacctgcacacctatgccctccactaattcttcaaccacaggagacagctttgagcacccatctagcgaggccgtaggtcaaggagaagttttccttcgcatgattataattctctcaagaggtgctggtaagaaatggaaaaaaagacttgaggatggaggttttatacgtttcaagggtgtggccggaaccgacgtacagaatttaaatgttgttcccatcagttaa

SEQ ID NO: 256 - DNA, 621 bp, Golovinomyces orontii
  source 1..621: mol_type = genomic DNA
atggctactgtaaaggcatatcccgaaggaaaaactctgctggatacattcaagcgatcatttgccgatgttcccctcgacgaagagagaagcaatttgatctcaaccactgaattcttggaggcaacggaatctatgacagtcctttttgatatccttggctctgtagcttttcagccagtaaagaaagatatcctgggaaatgttaagaaaatacgagaccgacaattgaacgctcccgcgagttctctatcgttgcaagaactcgttcggagtgaattgagcagcaaaaagcactctgccaccgaaggtctagtctggctcatccgaggcctagactttacagctatcgcgttagcccgaaatatcgcgtgtccgaatgaagaactctccgcctctttccgtagtgcttatacaaataccctgaaatctcaccactcatttctggtcaagcctatattctctgcggccatgtccgcctgtccttatcgcaaggacttctttgccaagctaggtgatgacgagaaaatagtctcccaagccttgaaggtctggtcaggagacttgcaaaaacttctggagattttaaagtcatttttggacaaagaggcaaaatggtaa

SEQ ID NO: 257 - DNA, 1593 bp, Golovinomyces orontii
  source 1..1593: mol_type = genomic DNA
atggctcaaatctactcacatttggcgctgccttcttcacttccagagcggacttctatctgtcaaaaagttgagaaaggtccctattcatcagacctgcaaaattcagtgcctaagagatacgctgaacgtatatctcaagattaccgaaattcatccaaatccccattcccattcccaatttcaacttacaattataatatgcatatcaagataatgacaccaaaatcgagcgaggaacatcaaccatgtccggaacttggtcatccacgagaatcattacctcccttgaggtctatcttgaatggtttaggccaacagcacatgatttcaggaagttctactcgaaatagccctccgatccacagcagttatggtcaacaaggtcgtcaatcaacaacagtttctcacagccgagctcgctctcatggttcttcgcaaatgggaaaaattgataattcgtgtctatcgttctcaagtgatactctgatacaaaactccataagaataaatctaccaccgccttcacaactacaatcacacaatgacataccaagaccaaagtcacctactcatgacacgggtcagaatatgccgaataagctcaaatcacaatcatcatgctcttttgaaagttggtcatctcagtcttatccgtgtcatttagattctgtccagatggctcctttttcttgtggaatcaagtccaagcattcttcatctcctaaaaatagcccaaaactagaaaaacttaaagtcgttgagttccaaaatttctctactccagctaattcttccgagccctgtgcagctgaaaatccggcgattgaggatgatggtcttggtcctaggatctggacgggaaaccgttttttaccgcggtttagtcacgagcgatttattcctggagaaggtaaatgttatttctatgatgatgggtcatattgtaaagcagtgattgatggcgaggtggtcaacgctcattggggtgtaacaaaaacggggaaaccacgaaagagactcgccattgcatgtatgacttgcagagagaaaaagatcaagtgcgaccccaattatcctcgatgtgttcaatgcgagaagtttgggcgggcttgtaagtttaagaatgccccgcgtggtagtcaaagcttaccgggtactccattcgcagatatcacggagttaccaattcagcaaagttcgatacgggatgaggaaactacccaagtaaagcgagaaagtacccaatctgtctcaccccgtcagacagtggtacgacacgagattcttgataatgagatacaccaccaaaaacgtcaaaagaatggttattgcgaatttacgcctacattttcagtaacatctccacgatattctgttaagaatctttcatcaccatctactccttttgttgaaaaaaataaaagctttttgtttgattcgactgtgtctagtcaactgcaaacaaacccttatgtcttatggcctgaatttgtgacagatttactcaatatttttttaaatttgttcctgagacaattagtggaatttttgcggaagtcccattcagaaactgggctcttaccccgataa

SEQ ID NO: 258 - DNA, 1449 bp, Golovinomyces orontii
  source 1..1449: mol_type = genomic DNA
atgattgaggaacatcaagaaagtgagagtgattgctctaataggatgcttcagaatgaaaaattgaaaacccaaactcatggaaataaggaacttttaacgaaggacaatctaaattgtttagaaggacaaagattcactagtcgtaacgaaatctccgatcgtaaaatccaaactcatctattgtattctgcatttccaacatcaagtttggccatttgtaagtatgtcctagatggtacaaatggggatataaacgaggcctgggaagccttatctatagaattctctgcgagcaaaagtcaaaatgacgttattcgtcttgcgtcgaagaatgacagaaaattgatctgcagagaaaccggttcgatatctgttttgtctctcaacgattctcattgtcagaatttccaagacaaaatctccaataaaaaaaagggctctagaaataaaaaatacatccaggaaaaccatgatcaaaatcggctttcaccttgctctgttgtagctacaaattcccaggcatcaatggaagttaaagatcaaaaaacggatgactttatagattgtggaaagcgtgcaatgatactgagtcgcaaaaagaacccctttccatcttcaaaaactacggaaagctctcaggaagtaaatcctcacaataaacatatcaaggcaaaattttcttcaaatgaagctactttgaatgaaaattatagctatgctgtctcatcgagtgtttcttcagatacgtcaaaaagtgaatcagacgtaagcagcgactcctctaatagtattgatgatagtagtagtgactctagtgatgaggaagtaccagatgagtcatccagcaaatctaaagtcataggcagctatactacaacaaattcaaagtctacacaacctgcaactcgccttcctgtggttccagggaaaggcaaaagagctacccagatgagaaataagcgtagaagaattagtaacgccatgaaaaaacttaaagagaaaggaattatatcagcagatatctcgaaagacgatttcatggaattttacgagaaaaaaatacctttccgtgtttctgagcagaaatgtacaagcaatgagtcaaattcagtctgtaacaagagcaaaatcaaggtaaacggagatgaagaattcatgcgccggagaaaagaactacttgattcacttgcttctggtggaatcgaagtacgttctgactcaccaggacatgagacatcaccgactactaacgctcaacttaagtcttcagaaaaagagcccgaatcgagtacaggaaaaacaggactttccgagatagacgcgaaaaaagtctctatcacagccggatcttcagagctcacaacctcgataagtcttccagaatcggaatcatccaataaagaatttaaaaaaataatgacaagccatcccaaagggctagattag

SEQ ID NO: 259 - DNA, 1248 bp, Golovinomyces orontii
  source 1..1248: mol_type = genomic DNA
atgggtactttaaagtacgttgctggagttgtgttttctatctcttttatcgtatttgctgctttttttggtagactcccccgactacgaaaaactcccattggttttttgtaccgtgtattatggtttcacataccatctggatttcgagtcgttgataggaaattaacaaatggtcaaataagtctatgcgttttaagactagcaagccacctctggaatgacagacatcctctgattttgatattcttcatgctcctcttaggagtatcggaggtgatgttcttgcctccggcatggcccttattatcaatttctcaaaaatgtttggcgtgtaccgcaatcgggcttccttggatctctctttatgcttctgcggcaacggatcctggatacataactaagtccaatcatagtcagcagatggcgctctatccttatgacttcaccacattttacccaggtctgacatgccgcacttgtcaaatgctgaaaccagcacgatcgaagcattgtagtatctgcaagcgctgtatatcaaagcttgatcaccattgcatctttatcaataattgtgttggctaccgtaatcatcattactttatcctactcgtcttgtcaaccgcgctcttgactatttatgccacttacataggtatgtcactgctctcggaaatggttcgaaagcaatttcctggctggaatattcttggtattgggtactcatggacccaatacaccaatgcactggcctgggcccttaacaaggaagtcagaattggttctatcaccctcttatgcctgttcactagtcccatggtatcagggctattcatttatcatacatatcttatctgggctggaaccacgacaaatgagaccatgaaatggtcggacttaagtagcgatatgtctgatggatttgcctttagacgaaacttatctcttcatcgaacacgcgatgaaagatatgagccattatggacaagatggccaaaggaaagcgagcatattatctcgcgctcatacaatggccaaactccccatccaaatatcataggttatggtgaatgggagcgggtctggagtttagccgacatcccaaacctatatgacttgggattctacaataatttgcgtgatattttttggccggtatacacatttgaacgagtcaatcaagttgagaattcttctactctgaatcttaattatacgaattatccaaattctacggataatcaataa

SEQ ID NO: 260 - DNA, 2664 bp, Golovinomyces orontii
  source 1..2664: mol_type = genomic DNA
atggaggtgaactctgcagcggcggtctgtgaaggtagccaagaaagtagagacttatttcgaggaatgaagtttttcgttgttcagcgtatttcctctatcaagcggagtgaaataattcaaatgattaagacaaatgggggtgtcgttgttttacacgaagcacaggctgatatactaatcgccgatcacgagagggaagatattcctcctggatccatttcatggacatttattgtggaatctatccgaaaaggtagttgtcaagaccttgagcaacataggacagggtcggccagaggtaaaagtcgccacatgaatcgtcaaacaggcgtaaagtcaagagcagcatttagcgcggcagatgatgaaattctaatgaaattttgtctaaacgctgagaaagagggtttggacatgaaaggaaatgttatttacaagcaattggagcagaagaacaatcgtcatacgtatcagtcatggcgagatcgctggatcaagcatctctctaagcttaagcctatcaaacatatcgaggcaacaaatcactcggatcaagcccctacagttaataatagagaggaaaaaataaacgatattgggtcatgtaacaccagttatcctcgagaaatcaagccagtaagtcatggtgagatggattccacaaagtgtacgagttttaagtttacatccaacaatgaaggttggtccaattcaacgaaaagcaatcttttcactacagaggatatagatttactcatcctcgtacacccagacattgtcaaggtggatgatgaccatgagattgacgcttggaatacatgggctcatgaatacccacaacacacagcacagcaatggcgaaattactacaaatatcatgtaaagccccagcaagaagcgttagcttctagaaaaccaaagcccactccgccggagaagattttgcataaaattggagcagtagcagagaattacgaaacacggccttcaatttcatcaccactcagccataaagactaccaagaaacgtttcaggtttctcccccctcaaaacaaataactcggtaccgaaaattcggagagaccaatgaattctcaaacgatactccgtctatctcggaagctcagttattagcttatgaccaaatgcttcataatgaggagcttttcacgcagggtctacaagatcttgcttatgaactagatctagaggtcaattttaatccagatatatgtggacgaaaaatctcattaatgagactttggcaaactgtgcagtcatctaaatattgcggtttagacgaagtctctgaagacagtttttggctaaaaattgcaagtgaatttggctttgataagtccgctgctacaaaattaaaagactgttacagcgagatcttgtctgattttggaaatcttagacgagaatttttaatggaaggattattgaatgaatctcaagagaatgactccatcgagaatcaactatcatcagacttaatttgtgcaaaaaatgatcattttacaaagagcgaagatagcatgtcatttggttctcaaatagttcagcacgattctgatgaccttgacattcctctaatccaggaagaatttcaagtcttatccagggaattaagccttgaaagtaatcagtcacgaagaggatttattcccaacaaacgtcaacgaatcagaaattgtaagaaggtactggagatcccgtccactcccgaaaataaaataaatggttatcaagacccagatctagctcagaatcactcaccaaaatttgattatatttctgacgagactgatgagcttgagcaaatgaatcagactccctccaaccgtcgtcatagcacccgaaaatcaaagttgatgcgaaattcaaattctgttcacaaggaatctaaaaacgcgtcactatccgctgtagagatggacccaaaacaacaccttaatgcaagatttaaaactaagactatagttgacgaatatttatcgcgacatcaaaagtattctactaaagataacgagccctctgaattttcgtctaacgtagtaaaatataagaactctacagatgtagtgggtaatggaatttttaccacacaagataatttgagttttgagattaaagaggatgagcatctatataatcaaggcttgaaggattcatactttgggcagaattcagattcactatgtcctgagcaaagtgaaaaagcaatagtgagacaatgccacgacgcatcgtgctatccgatgaagcaaattaggactgaagtaaatatagcaggcgctgatgaaattggcgttgagaacgaacttgatagatttatccgtgaacaggtgtttaattcacacatctcccaagatatcgtagttgaagctctcgaagccacttccttgagtatcggccccaaatcctgtattgaacaggtcatggatagtttgatgaataatgaaggaattccagatcaccttcctggtgtttggaccgcaactgatgatgaaatactgaaaaaagcatttacacagtcctcaaaagtacggatagactctacagtttatcaagatcttgttaagaaacatggcatatctaatattaaacttcgtcagatgtactggagggacatggaagatgatgtggaagattag

SEQ ID NO: 261 - DNA, 261 bp, Golovinomyces orontii
  source 1..261: mol_type = genomic DNA
caatattttcttcaccagattctcccagcagtttcagtacttctcgttaatgctattgcaattctatcggaagatcgatttctcgcacgtgtgggctggtctaatgggttttcggaacctgcatttggtgctatgggtggaggtgatgccagtataaagaacaagctgattaacttaatgacaagcgtccggacgctgatgcgaatacctctaattattctaaatacagctataatcatctatgagattgcattaggttga

SEQ ID NO: 262 - DNA, 651 bp, Golovinomyces orontii
  source 1..651: mol_type = genomic DNA
atgaacaccattaatatttcagctactctaaatctgttacgacttgttacccgaccaaatctttgccttcctcaagctaccatctcaacatttgctgatttaccagtaccattagatgaagcattttcatcaaatgaaaaagggaacgtaaatattaaagcggtagttcttgataaggacaactgttttgctgttcccaacacaaatactgtttacgagctttatcagaaaaaatttgaacaattgaaatctgcttatcccaatggacgactcctcatcgtatctaacaccgctggtacaatttctgtagatcccgtaggccagttagcctccgaagtgcaagaagcgacgcgagttaaggtgcttcgacatgctatcaggaagcctggatgccatgcagagatcttagaatatttccgtcatcaatgtcctgaagttaatattacgagaccggatcaaattgcaatcgtgggcgaccgaatctccactgatattatgttggccaatgtcatgggaagctatgcggtttgggtacagaatgggattgtgcctcgagaggaaaccagtatttttgcccggcttgaacaaaaatttgtgtcatcattaattcgaaaaagctatcagcctcctgagccagccagtcatttctaa

SEQ ID NO: 263 - DNA, 780 bp, Golovinomyces orontii
  source 1..780: mol_type = genomic DNA
atgatgactcagtctatctttgttttattaaaatcaataataattcttcttgttatcttatctttaacaataattctacgttttctttacactaccaaatgtcaatttgctagcgcccagagaaaacctaaacaaagtccttcgcacctaatagctatattgggatctggcggacattcagcggaaatgaaatctcttttaagagatttagatccaacacgctatacgcatcgtacttacatcgtatccagtggagataattttgcacgtgaaaaggcttttcaaattgaaagtaatattcaggccagactcagaccatatagtccgacagatgctgggatctgggacgacgtaaccggaatatgggatatagtactggtttcaagagctaggaaaatccatcaatcacttcttacaacacttttttcctcgctatggtgcgcccatgactgtataagagctctagacttaattaaaagatcttctaaagctacaccgaatgaatatcctgatgtgatagttgcgaatggccccgccacatcagtaatatttgttctcacagctgccgtcctgcgatttctgggtatggctcctatatggaaaatgaaggttatctttgttgagagctgggccagggtaaaaagtctcagcttaagtggtagattacttctgaggcttggaatttgtgacaggttcctggttcaatgggaaactttagccaatagtattaacaagaacgggactcaaaaagtagaatggtccggttttcttgtagactga

SEQ ID NO: 264 - DNA, 297 bp, Golovinomyces orontii
  source 1..297: mol_type = genomic DNA
atgcttgaaaataacagtacccacacaagctctgaatgccatccaccggctacgactgtcaaagaggctttggatagagcaagggaatgtgctaattgtgctcaaaagactgctgttatcgcgttgctcgagagcgagatagggatggtttggaaaaaaattcttgcaattcctgattatttaatgagtcgagacgaatttgctatcttcaacttcttccagacccgctttgaggggcagcaagttgcaagagacgctaggaagcgatattgggatcataaacagtcaattggctga

SEQ ID NO: 265 - DNA, 606 bp, Golovinomyces orontii
  source 1..606: mol_type = genomic DNA
atgatagatttaaagcgcaaacgctctgattcgggcacacaaatttcatcttcttctttctcatcgcagtactcacaactagattcatgttcgccgacacaatctgtgacacactctctatgcccttctcgaactcgaaaacgccatcgcaatagccgaccgtcagattcagaagtttttgatcatacactctccattctcttttccgctcaacgaaatgcgccaacgctttcccaggatttctcatccaaagcaaactctgagccaccacctactcttctatcatctccacatcaatcaaaaaatcaatcctttctctcctcttactggaacatatcgtcaaggcgtgagacgccaagctccgggaaaaactccatattttcagccggagctttactaatctcaaagctatcaccaaaatcgcttcttccgatgactacagcttgtgaagattgtggcaaggccctctgcgacaataaatccattcctatatacttcgatggcgaggaacatagatgcaggcattgtgggaagtatgtttgtgacagttgctctatctgctatatagacatggagatgaaatgcttgaactgtactatcgaatag

SEQ ID NO: 266 - DNA, 621 bp, Golovinomyces orontii
  source 1..621: mol_type = genomic DNA
atggcttgggaaaagagacagcccgacgttgtagctgacgctgtgattaagagagcagaagttggaaagattggtcgtatattaagaacacggcttgcctttgcacagttcaaggttgcgcgtggctgggaagatttatcaatcgatgccatagagcccaaggttgatgaactacacccaattttaagtgacgaaactttttccaaatcttcgagtccaaccacatcaaataccttctatagaaaattcagaaacccccgtatgagagatgtcgctattttctctgagcacattgaccctgatggtagcagctgtcagagttggggtctttacaggaagcgtcgctatcattgttgcctcaatgattcggaaatttgctcaagaaactctctgaagagataccgctcatctccgccattagccagtaacattgaatacgatgaacatcatcagcccttttcctcgccagttaaggcacaaactaatacccatttcacaactgcttcaggcccagatctccagttctcaaccaactcataccagaggaattttcagatttatcgtagtgattttgagtcagaacacgacgagacaagattaccgccatatacttacacctaa

SEQ ID NO: 267 - DNA, 357 bp, Golovinomyces orontii
  source 1..357: mol_type = genomic DNA
atgtcgtccccaactgcctttcgctacatcgcagcctctaacaaatcagattttggctgtattctcatagtatgcctcatcaagcctggagttagtgtaaaacggcagggaataatcgccatgttgagcaatcatgttatcattggcacttccgcccaacccagagacgggaaagccaactgtgcgactttgaaatggcctaaatcagatgtggagattacacgaggctgtaagtctcaaattaaaactattgctattaaaggcctggacatcgcaggtagagagaacgagcaaatcgctaagtttaaagaaagactagagcatgcctctaaatcaaaaattacttttgagtgttga

SEQ ID NO: 268 - DNA, 2706 bp, Golovinomyces orontii
  source 1..2706: mol_type = genomic DNA
atgccccttcaacggtcgttttctgaacagaatcattcaactaaatcgaagcaaaaatggagtcgaaataggaacacgcagagaaaaaaacctactgatctacactcgaatctattacaagaaaaaccacctttaccggtttcaactgccacaaagaacaaactcaacaattttcaatttagcggtcgagctcaaaccgagcttaaaaaaaagatttgtcaacggtcgaacgatgaaaaagagaacgaagataccagagaaaatcttcacataataggagaccatcgagtacaaaaagaggagagagaggtacatcacaccccacccaataaaacctctaataaaagaccctctacccctgctagtaaattaacgctgccggacttgatttgtatgggagatgtccgaagagtgagacaggacatttcgccagaggagaagttagaatgggatcagaacaaaggtgaacctcagaattttgctctcgattttgacgctgtccgagctgtccgtaagcgagcccaaagctcgtcacctttagtctcatcaccagtacaagctcccatacaatttgacccaggatccgaactttgggggcgttactctcatagtgacttgcaacttccaaggtgtgaaggtctatctataccttcactcgctcacatcatgaataaatcctcgcctaagaatgttcaagaaggagtacctttaagatctgtgtctatgttcagaagggcaaatagttgtggaaataatttccccaaacggatgaagcacagtgacattagaaatgacgatggtattgatccacccttcattgactcttccaaagtatcaactttgatcaagcaaataaaggatggattagctcagcataagacgccagatacgattcaagagagcactctcaaaactaatcggtctgatttcattgaaattcctgtgaaccaagaagcctcctctaggattaaaataggtccctcggaatttgaaattttaccacaccatcagtcgaaagtatcacagtctgtgcgcgatcatgatgctcatgattgctcatcaattcattctctaaatacagactatggagactttgatgaaaatgaattagacccaagtctttttaaaacttctaaatcagtttcagaagaatctactttacactcgaagtgtaaatcaatttccgtaggatcttcagcatccccatcaaaccaaaagcaagaaaaaagcgaaaggtactccgctcgaacgagtggcgtaaatcctaagcagtcccacacggctagcactggagactttactggagaatttgaagactctgaggttgagttcctatctgcagatttagagtttatcgtatctcagtatgatactcgatctactaataaaccaaaagtactaccgtcaagtcacgtggtggaaaatcaactgaaaaataaagtaaatatagagtctgaagacgaattcgacgatggaggtttagacgacgatgattttaaggctgcagaagcgtccacattacagacatctaatcgccttacgactcctcaagagaaaaccagagctatacagagatacttagttatcgacatcatgagctctttctacgaagattccaggggtcgtaagaaaatagaaaaaatcttgtcactccagatcgaacacacgaagcttttaagatcaatacacctacggggaatttgggtagagacaccggtaaccataaatgcgtttgtgcacgtaattggattattcaattcgaatggtcaatgtgtcgtggatgatgatgaaaatttactcattctgcatcctgaccacctaatttcgtctacagttgttgctgattccttcagctgtactcgtcgggcagttcttcaagatagagtcaaggccactagtctaccaaatgtctcccttgtttatggtacattacttcacgaaattttccaggcagctctcatatcgaatcgatgggactctgactggctagaagtcctaattgacgacgtagctaaaaaacacattgaagatctttatacaattaaacttcagactcctgaggctgtccgagatcttaaaaataaaatagctcagttgcaatcttgggccgctctttttatttgttcaaatcccaagccagaagcaattctcaacacgccgaatggagagacagtttctatgtgtgtcgaaaagctccttgagattgaagaacatgtctggtcgccaatgtatggacttaaaggtaacattgacgcaactgtccaggtcattctaaaagaaaaaaaaggccaacgcagacttatcgttcccttagagctcaagacgggcaaaaaccaaagtatttctcatcgtgcccagacagctctctataatctacttttatctgatcgatacgatattgatatagctcatggcattttatactacatgcagacctctgagacgcaacagattccaactatccgacatgagcttcgacatatgataatgcaaagaaatgagctggcatgttttgtccgagagcgcagctcccagcttccagccatgctgaaagaacaatacaagtgtagcggatgttacgcaaatataccatgcttcatatatcacaaacttgcagatgatggcacgggcgagactagtggtttaaaaagtaaattcgacgaacttgtaaaacatttatcccgtcaacataaagagtttttctaa

SEQ ID NO: 269 - DNA, 1188 bp, Golovinomyces orontii
  source 1..1188: mol_type = genomic DNA
atgatgaatttgcacgagaataaagcatctcagtttaattcgtctactctgccaatagctctttcgacttccagtgaattccctaccgtattaatcgctcattctcctttcaatcaatcgtcatctcatagctttgatagtgttaaaaagtctctcaacctagcaaaatatcaaaaggatccattgccccagtttgtgggaccaaagtctcccgattctatgaggccaaagagctcgaaatatattcaaagaaatccaaaaatccagaaaactcaatctctttctaatgctcttccaagtgagcattcgcatagcgagattggttatgactctgggataaaaaaatcaaagagtcaagagtaccaccaaaacaagttaaaatatttcaggttaccattggctgatcatacttctcatgtcaacgaccaggtcgaaaatttaatgggggtttctataaaaaaaaaaaaagcatcatgtcaacataagcacgtgaaaatcaatggaacagactcacttggaatctacggtctccaagaaagaggcagtaatacagctttaaaaactgttagctcgtgcactaaagatgctactctaaaatctcagctccatactagaaaattcatttttcagaataagaaaaagtcaacattaattccaattttctcgttagttaaagatagatctttacaagggaataagaggtcggataatacctcaaagtgtcagaatcatgattctacttgtcactcgaaactggcgaaaaaacttggtaaaaattttagtaaacgccctaatgtatattacaatcttcgatttcgttatacaaagagctcgactagctatcttaaaaacaaaaaaacggctccaaatgacgattgctacatcaaatcaataaatacagtagatttgccttcttcatttacgacaaagattagtggatttcacgggggatattcaactaaaaatacaagtaaatcagaattgttgcgaaaatcagactcaatatccagtgttctgtatacttcttgcggatccattgagtcccagacctcagatgtccaaaaccagaacaaaagccacaaaagaattacgcctgtgcataaatctaacaatagtcataactggtatcataaaaataatcgcgtaagtaaccgaaatacattgagaatactagtgagcccaatttaa

SEQ ID NO: 270 - DNA, 669 bp, Golovinomyces orontii
  source 1..669: mol_type = genomic DNA
atgtcaatccgcatcgcaatttttgccctcgttttctttatacaagtcttgtctattctgtcgaaaaatgttgaacaaagtcaaacaaaagaattaccgctgtgttcttatcagtgtggtgcattaactcggtccaagataatcagaaactgtccattgtctagtcataaatgtgtgtgtcaatttatggattcgtacacgctttgcactgctgtgaaatgtcgtggtcacgattttaatgccgccattagagctcctatgcccgttttcatgcctgagataatgctcgtctcggacgacgattttgaaccgatttgtctcaatgacaagacggtggtcgatacaagtatcacttacagtagtaggataacagatgaagacttgaacgacaaaataaaaccatccataactggtgctactatcttagagggtaaaggacttgtgttgacgcccgatcataagggtggtatggttgcgacggccagtgagcttaatcacgctgaacttggctcagacaccaaaatccgcattccgagatcaaggaagagtactacagggtctggagggcaaagtagtaaagtgaagaaaaactcagcgataaaaacgtatccaaatccgtccgtgatgaatataggactttcactttttatactcgtggctcttacataa

SEQ ID NO: 271 - DNA, 1677 bp, Golovinomyces orontii
  source 1..1677: mol_type = genomic DNA
atgtctacaagtaattatcatgctacatcatcggctcgcgcttcacgaatctcgtcaacggggccacagacgccatcgcgcagtcaaacaacgcctaactttggctcaccctctgtactacgcgcagaagaagaatgcgttgtaatcgagctaggtagccgcttcttaagagcaggactcgctggatttgctgtccctcaagcagttgtcgattttggacctgagcaacaaagacgagtaggtgatttgaggagatgggatgtcaattatgatagctcgattctgtcaaaacctaaaggaaaatcatggggaaaggattatgagctttggcccctagacatgcggaacatagatctcggtttaatcggagataagatcgaaagagctgtgcgagatgcattcaccaagactcttttagtcgattctcgtccaagacgcattttacttgccataccatctatcttaccctttcctctgcttctcacggtacttgagaccctattctccaactttcagccgccaaatatctccctcatgtccaaaccaatcctaacaactgtagcagctggtctgcgatccgcattagtcgtagatatcggatgggccgagactacagtgtcgagcgtctatgaatttcgtgagataacttccagtcgatcagtcagagcctcaaagttgttaggtcaaacagtatttaatagaatatctagttttctcttgaacaattacgcttttgagagctctccagagaaaccagaaacccaacttagctttgaggaatgtgaagagatagttgaacgcatgatatggtgcaaatcgaggaaaaaaggagaaacaagacaggaacttactagaaaagaagaagatgattcatctgaaaccgatgccaacagaaattcccgcattgaagaccatgaaccgaatggtatggtaagcttgcctctaagttcaataaaacctccaaggactatccagataccattctcggagttttccgagccctgtgagactgccttatttgcaactgatattctggagtcagacttagatgatgaagagctacctgttcatcttcttgtgtacaaatgtcttctgaaattgcctatagatgcacgagctatgtgtatgtcgcgcatcgtatttgtcggtggtgcgacgcaaatacctggtttaaagccgcgaattatgcaagagctctcgtttttaattgaaaccagaggatgggatccagtgttcggtcaatcggcaaaacggtttaaaaacatccttaagtcgcgtagtataccaactcgtcaaaagcgtgtggcagaggtcgctcccttagacgaagctgtattagaaatgaagataacgacttccagcctaccacaagaagtcgatcctataacagaaaaattgagtcgcgaatcccgaaaaggccagcatccaatcttgattggaaatttgagagtcgtgaactcacttggggcttgggcaggtggtagtcttttatctcaaatgaaaatacaggcagtctctgtaatcgagagagaacagtggacccagcatggagctggtaaactctctaggcccaatgaacctagccacaactcccagcgacagagtatgggacccggagctcttagatcatcggctggagaaagatcaagttggaccttgggtatatggggcttttga

SEQ ID NO: 272 - DNA, 507 bp, Golovinomyces orontii
  source 1..507: mol_type = genomic DNA
atggcgaaggtttcggaagatgtgaaagtaaaagttgcaacatccaccgcccaggattttgtagaaacatactattcagctcttaataacatcaaaggacgttctaccctcgcaaaattttatgtcaaatctcccactactaagccggatataataattaatggcaacgttatctcaagtccggccagccttcagaagctttttgaaactcaaatcaatcgagttcactacgatgtaaagtcctatgacgcacacatcttgaacagcaactacaatcttggaggttccaccgaatcaactgagccaaataaagatggcaaaaaagcaagtgtagtcgttctcatcagtggatctgtaatatactggaaagatactgaagaaggagaaactagaggatttacagaaactgtggtcttagtcccaaatccagaggcattatcaaagtcagcgaagggtaagatcaggaaatggtcaattttgagccaaaacttcagactcattctctga

SEQ ID NO: 273 - DNA, 1071 bp, Golovinomyces orontii
  source 1..1071: mol_type = genomic DNA
atgggttccattgagaaatctttttcttctattcctcttcctcaaccttgggtccagacatctttagtctactcagaagccctatcagaagcagcaggctgcaaaatacacctcaaactcgactctgaacaaccttctaaatcctttaaatcgcgtggtattggtaatcttcttctcacctacctcagagcaaccaataacgagaaacttcctcactattactgttcctctggaggcaatgcaggccttgcatgtgcaacggctgcaacttctctctctcttccagcaactatagttgttcctacatctactaaaccactcatgattgataaaatcaaagaacttggtgaccatatcaaggtcttacaagcgggaaagcacttgggtgaggcggacaattacctccgtaccgaatgtctctccaaagatccaaatggtgtccatgtaccaccgtttgaccacccagctatttgggccggaaatgcaactgttatccatgagttaaggacccagataccgcactacgattccatcgtatgctctgttggaggaggtggtttactcatagggctcatggaagggttagaatcctatgaccaattatcggaaaccaaaattatagctgttgagacgcttggcgcacactcgttgaatttatctttgcgtaatggcaaaatgtcacgtttacaagccattgaaagtattgctaccagtctaggcgccacacaagttgcaacgcgagcatttgaactttctcaggaaaatgatgttgaaagtgtagttgttagcgatgccgaggcagcattagcatgcgttgtcttctggcaagccgaaaagattctcgttgaaccagcttgtggcgcaagtattgcaatgtgtttaaacggtggcttacgagaagcctatgcacacctttctgacgatgaatttatgaatttggatattgtaattttggtatgtggaggctcaaatgtcacaattgagatgctgagtcaatggatcgaaatctatggtgaagagaaagaagtccaaggatggtttaaagagggacagtgggtggggagcttataa

SEQ ID NO: 274 - DNA, 1257 bp, Golovinomyces orontii
  source 1..1257: mol_type = genomic DNA
atgagtacttctaaacatgggcagaaattcgaaatatcccaacatggcacttctccaggcttacagatggcttcaacttcaccgccggcatccctaaaggatcttgaaatcgtcgggatggtcggtccattaagcagaccaaaggcgaattctatatcgtcgcataattcctctctttcctcaaaaactcatcattctttctccacattaagcacacatactggctatcgagcgataaaaaaggatgtcagagctcttcctccttggctgaggacttatgaagaagaggaggaaactagtgcgccaattcatacttcagtttcaccccttagatcacagagtgcagaaaatcatcaaattccagataactttgccaggagagtctctcaggacgggtacgttgacgcatatgaagatgcaccaagtggtatcaacaaaaagaaaccagagactggattctttggagggcttaaagagccagtcaaaggacggaaatgggaccatgtccgagatggcgatccggttatagttcaaactagagcacctaacaagatcttaccttggcgaatattcatcgaatcatcttcatatggaccgtcttcagatgtagaatgtacgagagtagatcttgattttctaaatcagcaaacacctggttatcaaataccatggagaggtgatttggaaggaagcaaagatctggaaaatcatggtggaatgtctcatacaaggaaacagagaaaaactcttacaagacgaattcagcatcatttgataatgcatcctttagcaccattacttcttcgactaattgtattaacgacatctgttattgctcttggaatcgcgacctccgtccatcatctctctgccaagtatagttatgagcagactccatctagcactatggcaatagtagttgatgtagttgctattccatacattctttacattacttgggatgaatacactggaaagcctctcggcttgcgtgcacctggtgcaaagatacgattggttcttcttgatctcttttttataatctatgaatccgctaacctatcattggcctttggatccttaacagatgataatggaagctgcgaaagtagcgtcaatggatataattttgtcatctgtaatcgagtcaaagctctatgtgggattttaatgctagcattatatgcgtggagtttaacatttgcaatcagtattatcagactggtccaaagagttggtggaaaagaagaagattaa

SEQ ID NO: 275 - DNA, 1266 bp, Golovinomyces orontii
  source 1..1266: mol_type = genomic DNA
atggatttcgagtggcaaactcatgctcccaccgatccaaaatctcctttccctcaatccaagactggacaaaaaggatttgattcagtaccaccatttttttcgcttgccagtcaatcttcttcttctaactcaaaattctgcaattcttcatttacaacacctcgaaaggcattcgagcctgaattattatcagagacttctggcgttgagtcgtccccgggagatcatgaagatgcttattatacacctgataaatcaaaatctcttcgtgccatacctgtctttacaagcggtagtacattcagacagcctgttttcggtaaatatggcacagattttctaggaaccagtccaagtcgagcagatcatcgtcgtggaaaatacagcaaaacgattatccaaaagttgcgcaagagaaaacgtatagaccgcgacctcgccgcttgtcgatattctgaatcagactccggagaaagtgtatcgagaaataagagcagaaaagacaagagctcaaaggtacaagcccgatactctcaaacaggactcttatcaagcttcttcgactacattgaatcacatccaaaccttccaagtatactttctttctacgctcaactatcggtcaattttttcattgcaggacttatgatatttggagtctacacgttttggaccactgtgcaatcagatgttgataaggcctccgaacaagagcgttccattgctcttgctcaaattgccaaatgcgcccaagattttgttataaatggctgtgcaagtaagaatcgagcgccagtcatggagattccatgtaatgaattcgacctttgcatgaatcgagatccaaatagcgttggtagagcacgtattagcgcgcacacatttgctcaaatattcaacagctttattgagccaatcagctataaagctatggtctttatcgttcttattgtgatattaataattcttgtaaataacttagcattcggcatttaccgctccaaatctcaacctaacctttattccaacaataattctcaaggcttccaaccatgggtttctcacttatcgacaccaaacttaagtcatattatttatcctagtcaaccaaattatgatgtgggatcgaaattcacatcgacaggagagagaagtgttagccagagcagtcataatcgaggacgaagtagaagtcgtcaaaaatatgatatacagcaagaaaggagtagcagccagagaaaattaaagatagactctgaataa

SEQ ID NO: 276 - DNA, 441 bp, Golovinomyces orontii
  source 1..441: mol_type = genomic DNA
atgctattacgatcaagtgaagtctctgtggcagttttttccggcacagcatttttatttacctttgcactttttctctcgggatgttttctgcaacgtcaaacaatcgttgagcttcgtggaattataaaaccgcagcatttttctcaaccgggattgtctcgacaagatattcatttgccttcacaattcagtgataaaagatattggacgggtcgtgaagttatcgatgctcttcccggtataaagagagatgaaactggtgcagcagacaagataagagagaatactaggtttaattatgtctacggggctattagatggagagggagagaacaccaagagaaaaataagattccaagcgaggcagtcaactctttatcttcaatgactagaacagaaagaagaaaactcataaaatctcagttactcgtagagtga

SEQ ID NO: 277 - DNA, 651 bp, Golovinomyces orontii
  source 1..651: mol_type = genomic DNA
atggcaagtcagaaaatcaccaccaatttgattctcaacaatgctagtccgccctctgttccgtctatttgcgatcctgattttctcctgattttaatagagtcgctcaatccgcacctgcagtatcctatcgagtatacaaatgatccagttcatgatactcatcatctcatatctcagctagactcattgaccagggatattttcttcaagacctatttttaccacttttgtgaccctccgtcaccacagtatctatccaaaccatcctcccctttcgttttcagtgagtttatcagctgtccaaaaagctgtcctcaactcatcgaggctcacataaacacgagagacattcctgaatcctgtataccccgcccattttcaaagagagtagctgccgatctctacaaccatgtaaagaagtactggaacgctcctcttaatcagggctggcagatcgagacatatcatcgtgtctacagcgaggatcttggaattttgccaaattgggctatcgatgccgtttgggtctggcaaatggtcacagcagtcgattggagcaaagcagtacctgtacagaagagttttctattaatgtattactctagcacaggctaccaaaccaaagaaatgcctaaagctggggattga

SEQ ID NO: 278 - DNA, 420 bp, Golovinomyces orontii
  source 1..420: mol_type = genomic DNA
gactcatgggaggatgagatggcatcatcatctcaagatgatcaagacgaagctcaatctcctgtttcgtctcaaaaaaagcctaccattcttctagctcctccaccaactcctattaccccccttgcctcttttgatcattacgaggcaaatgatcattacaactataataatacctaccgacaggccaaatctcaagtcgaccagcatattactacgagacctgacaagaccgatgtcatcgcaaagagattagtttcaggcgcgttgggtatcaaaccagtccccaaaacagatcaccaaagagaatatgaagcggcaatggtggaaaaagagcttaatagaagaaaaaaggacaaacaggatctactcaaggctcaagaagatatcaaacgatctgaacattcggtttggactgat

SEQ ID NO: 279 - DNA, 1164 bp, Golovinomyces orontii
  source 1..1164: mol_type = genomic DNA
aggccagagcttcatgaatattcttcaagaagaagattgcgtgtctcaactgatacgagccaagaaaacgaccattacaattctcatccagacatgcgggaaaggacacgcccaccacgtgcccatcgcaatgttgatggtttttgggaacgccaacctacatcagcgaccaaaccccactttgatgataatgtacttgacctggaacgcggtccggatcgtacacaccgtgattatgatagaggtagcagttccgacagctttttctatcagaaaaaacattatgaccataaaaacatgtctcgtcgtgaaaaggcaggaatgggattgtcatgggtatacttaatgaacagcagtcttaaaaatcatatagttgcatttttaggagaattcgtaggaacgaccatgttcttgttctttgcattcgcaggtgcacaggtggccaatattggagttaatgctgaagccgagagtcatgactttgatgggacaccaacttttgatattgcagtatatctttacatctctttcatcttcggtttctctctcttggtcaatgtatgggtcttttacagaatttctggcgcactctttaaccctgctgtaacattgggaatggttcttgttggtgcaataccagtagtgagagcgatgttcctttttgttgctcaaatacttggtggtatagctgcaagtgcgatggttcttggcatgtttccagtcccacttagtgtccgaacctctcttggtcctggtactagcctcgtacagggtgtcttcattgaggccgttctcacagctgaattggtattcacaatattcatgctggcgaaagaaaaacacagagccacgttcctcgcaccaatcggtatcggatttgccctattcattgctcacttggttggcgtctattttaccggaagttccctcaacccagcaagaagctttggaccatgtgttataaccgcgacatttgaagacgagcattggatttactgggtgggtcctttcctaggtgctctaattgctgttgttttttacaaggttctcgttctgctcgagtacgaaatggccaatcctggtcaggacggtgatgatcgcaacgatcctacaaagaatgaagcaagatatctggagattgtacaaaggagaaataataaatgg

SEQ ID NO: 280 - DNA, 2034 bp, Golovinomyces orontii
  source 1..2034: mol_type = genomic DNA
atggatgtgcgagatatagtacagcgaaaatctgcaccatctgacataacatacaacaaagataaaagcttaaaaacagaatgcaaagaaagtctgtcgccctcagacagccagcctcccaaaagtgtcgcatttgaactcctcttcacatcatcttctcagcatagagcgcgcatacccatgagggttcagatatacccacacgatacgactgactcgattgtgactacagttaaaaacttttacggtttatattgtagtcctaattgcatgaaaggtgtgtgttttgaggacgaagagggaaataccctaattgctagatatgaaaatttccgaaacaatatgatcgtctatgttcgtgttataaacgagcctataccagctgttggattatacgtcccgtcagcttatctatctggatcagcagctcctgaatcttattacaacagtgatacgcaccagacactacctcttccctcggctcacatgttaagctgtaattcaactctttcaagaccaacatcgagaacatcacaaaagcacgactgctctcccaacaaaactaatagtcgccgtagcacttctgcgaatgcaaattctgtgacagctaagaagagccgttctcgatctggcttcaaggcacgagggtacaatctacacagcaattcagtcgatagttataatgatacatcaaatggatatagttgcgaagacgacgcttcaggatctgccctagcaaagacaaaaagcgaccagattggaagcacagaaatcagtttggataatattgttgaaggtggtcgtcgcaaacgagctaaatttgaaagtagtgaacttccactgtttgctccgacacaaatgcctgcggcaacctcgaactcatctatttcaccggctcgtcgcagcgagcatcagcgtccagtaatctactctcaatcgaatcctcaatatcctttttccaacccgcaactattagaatcaccacgaggaatccaaaacggtaacaggcaaacatccatgttctctactcccggcgcagaaaattgtcgcatgcgcggagacccatcgaatcgacagtcaatcaacagcacgcctagctgtaacagctcgggtataattcccacacccgatcctacagtgggaagctgtatgtcagaagaagataaagatgttgctttacaactcatgcgccttggcgaattctcaaatgtttcgcaaggtcgtacttcagcttctacacttgacgacacattcagtggcaaagctgatgcggcatcatctataggtgctatgagtgagtgcgggagtgacatcgaatttgatattcccatgaatcacaaaatcaaactagaggcaagtcctgcactaacacctggcgtggtgaacaaaaattatcctcatcctgaatacaacttaacaaatcaagacagcaatgtccttagtcaaaatatcggagaatacgaagaaagacataatgaaacatctaaagcgaaaatgaaagaagcttctactgatgacgttctgtccacgtcaaacttactaaaagcaaaatgcaaagtgacagctgttggcaagtctcgcgttggtatagtaggtaccaaatgcaaatctagcaagtctagatctcaacgggctagccagagtaagtccaaaaaatcagcaagcaatagcaaaccaatatcaccagcatcaatgccgccacattcacgcaaaacttctaactcatcatctactttcaactttcagccaaaaatcggcgaggacgaagaggatctttctactaaacctcgctgtcaacgatgccgaaagagtaagaagggttgcgaccgtcaacgtccctgccagcgatgtaaagatgctggccttagcgctgaccaatgtgttagcgaagatgaaggtaatggtcgtaaaggtcgatatggaagacatatgggagttcctgtaaaaaagaatgaacagatctcggaaagtacaactcagtcatctttcgcccatgggaatcattgcagccctagtaaaaaaaggaagagatga

SEQ ID NO: 281 - DNA, 270 bp, Golovinomyces orontii
  source 1..270: mol_type = genomic DNA
atgggagcaaatctatcttccaacatagtcgtcgacacatcagccgatgtaatcggcccaggcgacctaagatctgatataactcttctattccttactgggggtgttctctacgccatcggcatgatccttggtaccacgcagctggtagatcactggcgtggtccgaatggtgaacggaaaattgactttgctgtcgttttaatggcaatattactatcaactgcatggccagtaattctattctatgtatggttcttagttccatga

SEQ ID NO: 282 - DNA, 816 bp, Golovinomyces orontii
  source 1..816: mol_type = genomic DNA
atggccagcgaaaaacagctcaagtcgatactaaaaaaaaaacctaaaaatgaagatacgactggccaagatcactatcgtgacatagccctttgtcatgcaaatatcatacagcaaagaaaaatacttgaaatcgagattttaaattccactgaaacacttattgactacccgcttgcaccgaaacctgccaatgcctcaaacccctcgtcggccgatgctctgaaattcaagaacctcatccgatatttccagcgaaatgattatgattctcttgttgaagagcgaaacataaatgagcgctgtggctacgcactttgtcccaataaaagacaccgagacggaaatgatagcggatacagactttttggtactgccggtaaagcaaaagattttagaattgtagagaagagagagctagaaaagtggtgttcagaagattgcgcacttagagcaatgtacgttaaagtccagttgaatgattttccatcatgggaaggtggagttgccgagaacggaaccagtatcgatcttttggtcgggccaacaacaagagacttaattttccgagatcactcagaatcttcggcaaatcgcttcgatgagcgtaagagggaagagaatgttctcagtctggcaaaagaaagaataggagataaaaaaaataaaagtgctcaggattctgttgcaattcatgagaagcacagtgttactcctccgcagcctccacgattggaccaaattgagggatgtagcaccactttgactcatctcattctcgaagggtacataactaaaacagataataaaaaataa

SEQ ID NO: 283 - DNA, 234 bp, Golovinomyces orontii
  source 1..234: mol_type = genomic DNA
atgatcattgtacatgtaaacgaccggctaggaacgcgagcagccatcccatgtctggcgtcagatccgatccgtttatttaaggcacaggttgccgccagaatcggaagacaacctcatgaaataatgctcaagagacaaggagagagacctttcaaagaccagctaaccctagaggactatggaattagtaatggagtacagattgatctggagattgacactggggattaa

SEQ ID NO: 284 - DNA, 627 bp, Golovinomyces orontii
  source 1..627: mol_type = genomic DNA
gaatacatctacacgctccctaacctactcactttctcccgcttagttgctgctccggtaatcggctacctagttctacatgatcaccatacatgggccataggcctgtttacatatgctggtatcacagacttaattgatggatggatcgcgcggcgatggaaacttcagacagtagtcggtaccgttattgatcccatggctgataagacgcttatgactatcttaacggtatgtctagccattaaaggttctcttccagtgtggctcgcaggtattattttgggaagagatgttggcttggctttaacagcagtttattaccgatggatttctcttcctcttccaagaacctttgttcggtattgggacttttcgctcccctcagcagaagtccgtccgactaccatcagcaaatacaatacagctcttcagtttgctctaataggtgcgacaaccgcaatgccattggccacgattgacataagttcggccatgacagcgatgcagtatctcgtagcatccacaactattgtcagcggcgcaagctatatattttcaaaagatgctgtaaagattctaaaccatgaacataatatacgtgggaaagataatgaaaagaattga

SEQ ID NO: 285 - DNA, 897 bp, Golovinomyces orontii
  source 1..897: mol_type = genomic DNA
atgttctcaaggagcgtaaggccagtggtcagagccacggtttctgtaccatgtcgcagtttcgttccagctgcagcaaccttcgcaacgctgcgcgaaattgaagatcgtctcaaatcgataaagaacatcgagaaaattacaaataccatgaagattgttgcttcaaccaagctcacccgcgctcaacgagcaatgacagaatcccgcctgtacggccaaacatccaacacagtatttgaccaagcccagacgaagcccattcaagacaatgatcagaaatgtctcattgtagttgccagttcagacaaagggctctgcggtggtattcactcaggtttgagcaagaatgtccgcaaaatgctatctgaaaggtcgaacgccgatatcgtagttctaggagagaagtccaaggcccaattgagtcgatcgagcaataaaaatattgttctgagtttttctggcatcgggaaagatatcccaactttcgcagacgctcaggctattgctgatcagatcacacgtctacctaccgcatactcttccatcaagatattatacaacaaatttattaatgctcaaagctacgaaccaacgttcatagaagctttctctgaggaggcaattgcgaattcacccaacttttcagctttcgagattgacaaccaggtcctgactaatctccgcgagtacgctctttctaattcgatattttgggcacttgccgagggtcatgcttgtgagcaatccgctcgccggaatgccatggacaatgcctctaagaatgctggagaaatgataaacaagtatcagatcttgtttaaccgcactcgccaagctgtcattactggcgaactggttgaaattattacaggagcagcagcttcggaagaataa

SEQ ID NO: 286 - DNA, 804 bp, Golovinomyces orontii
  source 1..804: mol_type = genomic DNA
atgtctgaaagaaaagttctcacaaagtactatcctcctgacttcgacccgtccaaaattactaggactagaggtccgaagcagacaggtcccaaagttcagacggtccggctaatggcaccgtttcctatgaaatgcactgcgtgtggggaatatatatataaggggcgcaaattcaatgcgagaaaagaaaccaccgatcaaaaatactattcaatacccatctatcgtttctatatcagatgtacaagatgctccggagaaatcaccttcaagacagaccccaaaaacatggattacgagtgcgagagaggagcaaagagaaacactgaaccgtggcggatgaatggtggcggaaaacaggaaagtgacgaggaacgcttaaatcgattagagcgagaggaggaggaaaagaatgctatgcaagaattagaaataaagacaattgatgcaaagcgagaaatggctgttgcagatgctttggacgaaatacgaacacacaatgcaagaaatgagcgtgtaggaaagaatggacaagaagtaactgtgatacgagaaagtatcgatgaagcaaaaagaagacaagaacttgaagatgaggaaacggcacgcagggcatttttgcgagcacaagaggctcttgaagaaatcatagaagaagatcaagaagagaatccgaagaatttcaatacaagctctaccacttcggatgatcatgaaagaaaattgatgccaccacctcagcctccagtaaaggagttcaaacgagtggtaaaaaaaagaaggatcatgcagcaatcttag

SEQ ID NO: 287 - DNA, 444 bp, Golovinomyces orontii
  source 1..444: mol_type = genomic DNA
atgagtagaaattttaaaagtttaaacctaaagaacgagggaagcgttgcaagggaccatctggccctagagcgtacttttcttgcgtggcttcgtacgtcacttgccttcgcttccatcggcgtcgctgttacacaactcttccgtctcaatatcagccgccaaaatagtgactctggcaatgatataactacaactctaaccataaatgaagccagcgatcgcattcgaaagctgggtaagccactaggtacaacattcttaatgataagtataatcacactactcttgggttttaaacgatactttgagggacaatattggattattcaaggaaagtttcctgcaagccgtgggagtattattttaatgacagccatcacctttgtaatgatgttggctagtctcatcgttattttggtgcttgaacccaataataaatga

SEQ ID NO: 288 - DNA, 2268 bp, Golovinomyces orontii
  source 1..2268: mol_type = genomic DNA
atgggaaaaagaaaagtcggcgccttggagaagattgatgctgatctctccaacctccagtataagatccgaagagatccaaaatcgtatgttgaagatttcctcaaccaatatgaacaatatcaatctctgcgagatatatttatgtcctctcccaattcaactatctcaagcggtattatctcatttcatgatctcatcgacttcgttgcacatgttgcagattgcttccctaaagagacagtaaactttccagtagacctgaaaaatattcttcaactctatcatgcccaactggaaagtgaattgcgcgaaaagattgtgggaagtctagcaatgttaaagagaaaggaaataattaattccgaaaatctccttaacaccttgtttccaattctgatcacgactccaagcaaaacattcagaaccttattgtaccagaaaatattatctgatctccggacttcgaacgctaaatctacgaatcatcgattgaatcgcactattcagaattcactttttaacgttctcacgcaggatcgatcttcgtcaaaaggtatttgggcagtcaaaattacacgagaattgtggaaaagacaaatatggactgatgcaaaagctgttgagattatgaaagaggcaagcttatcagataatatcaaagttatttgtggcggagtaagatttttcttgggaggtgacaaagagcgagaagaactggatgatgaaagtagtgacgatgaaatcgccactgaccttggaaagttgaagcatcagtcaggtatcaacaaaaagaagaagaagaccaaaaaaacccttgagttagccgttaaaaaagtaaagaagcaagagaagaagaaaaatgctcctcatccactcaacttttccgcgttccattttcttcacgatccacaaagttttgccgagacgctcttttcaaaacatcttcaaaatacgaaatcgaaactcaatttggaacaaaaactgctagttttacaactagtttcccgtttagttggtctacataaactgtctattatctcactttactcatacttcacaaaatatctcactccgcgacaaccctctgtgacatcatttcttgcttctcttgcacaagcaactcactctcttgttccccctgatgcattagaacctcttattcaaaaaatagccaatgaatttgtctctgaagcttctgcttgtgaagttgcttctgcaggtcttaatgctattcgagaaatatgtattcggcaacctctagccatgagcgatgtactcttacaggatctcgttatgtaccgaaaaagcaaagataaaggaacgatgatggctgccaagggtttactctcactatatcgagaggttggtgctgatttattgagaaaaaaggatagaggaaaaactgcaactataggtatcaaggctggaactattaaggagcgtcgttttggtgaagaagtagtggggaatatcgaggggattgagctgttagaagaatggaaaaaggaagagcgaaaacgtaaacgcagtgagaaaggtctggcaacagatgatgaaaactctgactctgatcctgaggctgaggaggctctcggatgggaggattgggaagatgatagtgatgattctaatgactcaggtggatggattaatgtcgaatcggatgacgacattgaaataagcgactcggatgatgaaggacccgtaataaaaaaatctaaatttcaagatcctataactgaagaggatgtaataccggaatcggaagatagggataatactaagataagtcatttagcgactacacaaatactcaccccagcagatcttgctaaacttcaagagcttcgcctctcagcatccctcaacaataaactacatccccacaaagaaaagagtaaatcagcagctgcccgctttcaagccatagcggaaaaacacgctgatgatgctattactgccgaatctatagaagggctctcacgccttcgtaaatctacgaaagatgagatggtggcgctagctaaagaaggaaaagcagaacgcggcgagcataaaagtactcaggctttgagaagacaaaaaaaggagagtcaagggaagagcagtacaaacaaagagaaagctcgtcaaaagaactttcttatgactctaggtaaagccaagtttaagcaaaaacgtagtcttgtacagacccggaaagtattaaaaggtcatattgagaggagtaaaaggggtggtagaagaggaaatattggaatgtag

SEQ ID NO: 289 - DNA, 2580 bp, Golovinomyces orontii
  source 1..2580: mol_type = genomic DNA
atgaacactccaaaatcctccctaacaacctctacgaaaactgcgtctttgccccatcagagagatgagagttcggacgatttttctcaatatagaattaaatcaaccagtggcacacgtaactcagacactcaaagcagtctacatagtagcaaggctagatctacaattggcaaggcagagcaacaaaagatcgtttgtgctattagtgaagcccgtggtatttcgccaacagtaggattggcctttgtgagtataaccaacggtgaagcagtattgagccagatctgtgacaatcagttctatgtcaggtctctaaataaattggaagcctttggacctaccgatattctaatcgtttctactcatggcccaccgaatcctaagtccaaaatgtattcagtaattgaagaaaacattccatgggctagactgatcacaattgatcgtaaatattggtcagaaacagcaggacttgactatatacaaaagctagcattccacggagatgttgaggcaatcaatgttgcggttgccggaaattatttcgcaacttgctgttttgccgccgctctcaagtatattgatttaagcctatctctcacattcgcttttcattctctccgaataaaatatcaagcatcagaaggttccatgatgatcgatctttcaacggttcagtcccttgaattaattcaaaacgtacatgattcgaaatctaagaactgtctatttggacttatgaatgatacacttacacctatgggcaccagacttcttagaagttgtatattacagccatcgacccaggcagacgttcttactcagcgttacgaggctcttgaagaattaatttcaaaagaagatatgttcttgcagacaagacaggctctgaaatctgtttacgacattgaaagactccttagtagtttaattgtcatacctactcaacctgatattcgctattctgagcagcttatcaatcatatattgatgctaaaaagttttgttgaactaattccgccaattcgcgaagctcttggaggtgctcgatcagaccttttatctacaatacgagacaactgttgcccagataatattgaaaaaacactgcagtttatcaaggaagttattaacgacgatgtcgcctatcaaaagacgccccttgatttgcgaaaccaaagaacatatgctgtgaagtcaggggtaagcggccttcttgacgttgctcggcagacttttaaagaagccaccgaagatgttcatcagcatgttttagacctaaatcgaggtttggagataaatgcagagatcaggtatgataattctcgaaaatactatctaagaattttggaagctgctttcaatggaaacccccctcctgaagttctcatcaactgctatcatataaagggctacatggaatgccagactctggacctggtgaagttgaatcaaagaatcgaagactcacatcaagagattattcttatgagtgataacactattcaggagctggtgaataatattaggggggagattcctatcttgtttcgcgtttgtgagagtatcgctatgctagacatgattgcagcatttggtcagatagcaacaacaaatgactatgttcgaccagaaattactgactgcattgctattaagtatggtcgacatccaatcagagagaaggttcatccagaaaagtttattgcgaatgatgtctatgccagctcgcaaaaaagattccagataattactggctgcaatatgagtgggaaaagtacctacataagatcgattgcactgatggctgtcatggctcagatcgggagtttcattccagcttcttatgcctcatttcctttaattgatcaactatttgccagggtatcaaaagatgatagtaacgaagctaatgtctctacttttgcttctgaaatgagagagacggcgttcattcttagaaatatcgacgcaaatagcttggctatttttgatgagcttggtagagggacgagtagccgggatggcctcgccattgcgctaagtatttctgaagcccttattgagagtagagcaatgatatggtttgcaacgcattttcgagagcttgcacagattttgtcagaacgcgcaggagttgtgaacctacacctttcagttgatatgagtaaagaaaacactatgacaatgctctacaagattgaagaaggttatatgaaagaagaaaactatggattggctctcgcaagagtcgttgatctcccattccaagtccttgaagtcgcagaaaatgtctcaaaagcattagatgcccagactgctgccaaaaagaagtcatcaagagcttttgcagttgctcgaagacggaagctagtacttggattgatagaggcattaaaacaagctgaaaatggttctttgactggaaaagcattaatgagctggttggaaaggcttcaggatgagtttatccatcgaatagaagagattgaaactgatgtcacaattattgatacgaaagatacgaatacagatgaagaaacagtagctgacacatcgacagaggataatctgtga

SEQ ID NO: 290 - DNA, 1710 bp, Golovinomyces orontii
  source 1..1710: mol_type = genomic DNA
atgaaagaaaactctaacatcaacaaatcttcgacccaatatccccgaggtgccagcgtctcgcactctcagtccggctgtcatgagcctcatcccgatgcgttgattggcttctccgactacaaccacaacttcaacgaaagaggcgctgatctatcttcaattacttccctagcttctttgcaaccaatcctcaaagttccaggacatgagcttaaaatttaccggcatgatacaggtatttcaagcgctactacgaggacgctagctgtcaaccatcaaccgcatcaaagcgttcttgcctgccaaatagagggcgaagaaaacttacatgatttaaaaaaaattcctaccggcgatagtgcttataactcatcggatatagatatggattttgactcaccgaaccccgagcctaagttctactacccgcaacctttgaatatggctcttaccgaaccaagttcttctaataatcaaccatcatcattaactccgatccaagatattaacttctgccattctggactaaatatgcgtcagaagctagcgaatgatgactcgcagcaaagaaatcattcgataatacagtcatcgagacagaaaatcgataccaagacttcatctcataagacacctagctcaagaatgaaatttctcagcccctcaaaagatttaatcgtggaggaaaatatttcacagcttttaaagtctatgagacaaggaaatataggggctgatgaaagtaaatatcacgtagcaagctctctatttagtcgaagtcttagtaaaaaagatgaggagatggatgaagatgaaaaactactggtcagtgaagaaggtaaaaagcttagtagtaaagagcgcaggcaattgagaaataaggtttcagcgcgcgcgtttagatctcgaagaaaagaatacatcaatcaattggaagatgagatcacagtcaaaataaacgagaatggagatcttcgtgcacaaaatcaagcgttgatcgaagaaaacattcgtctttctgacatcactcgcatgcttatctcctcaccctctttatctggttttgttgattctatttctatgaatcctgtgttggatttagatttacatgcttatcagcaacctatacttaaaccagatctatctcaaccacagccaactaaagatgtcaatcctaacatatttcagcaacaaaaccaacaaccgtattttgacatagcatctccccctgaggcaccacttgatttctctgtagttgattataactatgatgaaagccacatttgtcagccacaagtcttttttgtaggaaccctcccggagatttttttcgattctggatctttatcattaaaaacgcttcccccttcaactatatcttatgctagagataaatttgattttcctcagattgagcactcgtcaatcttagacctgaacgggactgaagaaattttgtttggtcacgaagaaccttcaaaaaaatcagtatttaattttttcgacatcaatccccttctcaagactcagtgcagatctagtattcctcaacttactccatcgaatacagatcaatcaaagatattgagtcgcactgaaatcaagtacgagggatctgatgctgccgcacttcaaaaaatagatcgattagtggctgagacagatgcatgctataaaagactttctactctggttcagtatcgatag

SEQ ID NO: 291 - DNA, 963 bp, Golovinomyces orontii
  source 1..963: mol_type = genomic DNA
atgttcctcccaaattccttgccgcctccatctcgagagttgtgggaaaatgtgtcattcttatttcaattttttcccctggttacggtattgcaatggttcatatcttactatccggcagggaaaacgtctatcaagagtcgcttgaatttaccgggaaagatagcttggatctcgatggaagttccgggctttctaactgtattatattgcttgaatactatcccaagaggcagtaattcttttagcaaggatgaaaagacgatgaatcgaaacgtaatcccgacagagaatgtagtcatggcagcaatgtttatcatacattatatctatcgggcgataatagggccgttacttaatccctcaatgtcaccaattcacattagtatatggggctcagctgtatgttttcagttgatgaacggtatatctattggtggttatctagctggatatggttcaccactagttatatcgaaagccaattctttggatgcaccgacaatggattccatcaataacaagtcacaagcgcagctgcagtggaacctgggcatactcatctgggtacttgggtttctaggaaacatttttcatgacgatgctcttcgtgatattcgtcgttcagtgaaaagagagaaaaatattaaaaagcgcatcactgtcgaggctaagaaccacccatctgatccaagtaagaatttcaatgtcgataagcactatggtatcccgagtaaaagactattccaatggatactctttccccattatctatgtgagtgggtcgagtggatgggatggtggattgcaggcgggagttcatttcttcccgctcaaatctttctaatcaatgaaattgccaccatgttaccgagggctatccagggccgaaaatggtatcttgagaatttcggaataaaaaatattggcaacagaaaagctattttgccaggaattctttag

SEQ ID NO: 292 - DNA, 1659 bp, Golovinomyces orontii
  source 1..1659: mol_type = genomic DNA
atggaacgaaagagaaagcttcctgcacgcgctgctcgcgttgaatctggtagcaagaaaaggactattactccacctgaatcccaagcaaaaacggcaataacagaattaccaaaggaagctcctccagagaaagtatcattaccatcttctatttcatcagcaaaacctttaccaacagttacgcaacctcaaccgactgatctatcctcaaaagatcaagatgaagctaacttttatagtggggttttgaccgagtccctcaatcgatcacgacaaaaatggatgactgaagggatttttgagaaatactggaccaaagttcgaaagggaaagaacgcgccaggagaaccgcagggcaacccgccgaaggaatcgatgacaaagttagggacatgtactatgacagttgagccacatacttttgaggttacattatatgcagtaaaagaccccacatctcgaactttgggtcctaatgtagcggctaagccgcgcccctttctcgaatacggtccacctgctagaactcctcgaccagaatcacaaagtaattctctgctcacaaacatgcaacctctccagggatcatcttctggtacaaagaattcagcatcagtttctcttgttgataatcgacatacttcatccccaggcgatgttgtgttgaattcactagatcctccaccaacatcgatttcaattcagtcagctgcatctcttacgaatcaatcatccgtatctcagggaagagaaatcgcttcctcgaagggcacagacccagtcatacaaatgctagctcagcgagctggaacagatgccgaattgaagaacgtaatgcgaatggtggctaaaggtcaagcgacgcccgaacaattagcaaacttccaaaatcacattgatgaattgactaaacttcatcaatcacaacagttgacgcagccgtccaattctttaccttctataatgtccgatgatagttcagtctctgctccgccatgtagacctacccaatctttgaaaccttccggacaagctttacctccaaattcgtgcacaaccactccatcaatccaaaaacaaccgaactcacctgcgctcagatgtaaaggacctatcacttcaaataagtttgaaatagtcggtgttgtactagaattttcaaacggaaatggtgatagatattcatttccaaaatacagtattctggaatttattcctggtaccaatcaagttattgcgtcatttttaataattaggaaaggtagcgatgctgactcactatcttacagtccggatttagactattatcagccaatcagcataagaatatatgcacatcaaagtcgtcagctagatgccatacaaaaagctgtagagtctccagaggaggttcgacgatggatgaacaaagtcatggatgaatgccaaagagctgaatacgttttattggctatgcgcttacctagagaaatcgaccatagctcaacaataaaagatgaagacttatctaataagaatggccaaataaacatgcaagtcaattgggaagtaacacgtggccctactacagcctccaaattaaagccggccaaaaggacggtgacagaagatgagcactaccaaaactttataaacactatatctgcaattacctga

SEQ ID NO: 293 - DNA, 204 bp, Golovinomyces orontii
  source 1..204: mol_type = genomic DNA
atgacgactcgactaacgatcaatccctcagctccgcgtcaatctaccgctgtcggcagcagtaaatcacgacaaatggcacttttacattccaaattagattcattatcagccaacttggcggatctagagaatcttttacggatgacgagtatccaagcggatagtattaaggggttaggagcctggcattgtggactgtag

SEQ ID NO: 294 - DNA, 1635 bp, Golovinomyces orontii
  source 1..1635: mol_type = genomic DNA
atgaacgaagcagtcgaatatttcaaatcttttacaggtgccagggatgaaattgcacagcggtacctaggattaacagaaaacatacccgaacaggcaatacagctcttctttgattctcctgatctcgcttcgggtcttgaatcgctgccctcaatttcaacttcgaacttttcaaatacatccaggaatcaagctgaggttaacactactagaaaaaatgtggatatagtttgtctggattctgatgacccgatggataccgaggataatgatgctcaaatatctgacgttcccagacaagtcacaaaaataccaagtttcccagatattgaagacgacgagtccatcgctcggagaattcagtctgaaatctatgaaggatcattaacgggtactgaccaagacaccgatcgtgtacgagctccaatcgaacgccgaagagaagttttagtaggtggagttgatggagatgacgaagacccactaagaaatgaagcacaatctacaaatcttcatcaaatgatagctggatcttattctaggcttggagtcttcaatcaaacaccggtaccttctttatgggattctaatacagatcctgccgcttcatggcaagatctttcacaagctactggaggagcttctgaagcgtcttccaaagctgccagacttgccgaactatttcgacctcccttcgagatcatgcggcaagtatcatgggaaaccgcgagagatcagggtaaaaaagaacgaaaatggatattagtgaacgtacaagataattcaatctttgattgtcaacaactaaaccgggacctatggaagcatcccggtatcaaagaaaccatcaaagagaattttatttttgttcaatatgctaaagatgacccaagagggacccagtacattcagtattatttccaaaataaggacaacggtgcagcttatcctcatatctctattgtggatcctagaactggagagcaagtgaaaacatggcctgggcgctctgtacctcaggctccagattttttgatgcagatatatgaatttcttgatagatatagtcttgatatgacaaagaaaaacccagtcgcaacccgaaaaccagagaactcaagattaatagatgttgatcgtttgacggaacaggagatgttagatatagctctccagaatagtctcagtaacggcacagcaactgagaaattagagagtgatcctgatgatttgactaggagctctagtgatactaacaaaggaaaaggcaaagagattacagaagaatcgatcgaagccgatccaaaaacgcaagaggagagtaacacaaactcagctttcgcccaaatctcttcaaaaaattttcatcaagagccttcacctggaaatgaaacaacccgtattcaattcaaacatgctggtggacgtattgtgcgaagattcaatctcaatgacccagttcgacggatttatgaatggctaaagtcgcaacccatagaagaaaagttgggggtcgattttgaattaaaagtaatgggcaaagacttaattaatttcttggatgaaacagtagagatgtgtggattaaaaaatacaacaataatggtggaatttttgaattctgatgaatag

SEQ ID NO: 295 - DNA, 588 bp, Golovinomyces orontii
  source 1..588: mol_type = genomic DNA
atgatggaggaagaatatgaaatcaaaatgtctcgccctgatctaacccagtccaaaaaactaccactacatgatactctatatgacattgcagcaaactatgggaagaaagagcgacagaagcctgaggatgcgggattccctcttgggagaacagctgaagctactctttggacaacaacgtttaccatgttgcactctacacttgacctattagttacacatcagtatgcaataggaattgactggcttcaaattttatgtagagccttcaaggcatttccaatgatttttctgcttgtttacagtttccatccccatccaacgccttccatattgctcccaacttttccatctagttttcatcatatcctacatcaagccagctttttcctggtcagtatagcggccggatcttacctgatacatgcaacaaatatgcatccatattatgccgttatgaagcaagtaccccccattggttgtctttgggtctggtctgtggttgagttgaagataatcccggctttgtcaagcttactgtgctgttgtataattctaaagacaggtggctattcaatctcttaa

SEQ ID NO: 296 - DNA, 609 bp, Golovinomyces orontii
  source 1..609: mol_type = genomic DNA
atggacgaaggaacatttacattcttgcctattcaaatcgatacttcggggaacaaaacatgcgtcactacctcttccgactctcagtcacttcaacgcgagctcgaattaatcaatcagttaaatcagaatcttttaaacttaaaatcacctgttccaccacctccatgccctgtcaatcccaagcattcggcaaatatcacgaagctacgtgaatcgggcaatgcagcttttcgactgggtaaacatgccgaagcgattcgcttctactccctcggcctggaaatgtgctctaaaagaccattgtgggaaccatgtaatctgtttcgggacgaggctgcaaatctttatgcgaatcgatctcaggtcaatatgtcattacagaattggccagagggggcaattgatgcgaaggccagtgttgaagctaagaaattcggtaacaccaaagcctggtggcgcagaggacgatgtttgctggaaatggggagaataaatgaagccatccaatgggtggaaacagctttggagatccaagaaaatgacgctgaattgtcttcattactacgggaaattcggaggcgggaaaaggggatcaagaaaacttag

SEQ ID NO: 297 - DNA, 2046 bp, Golovinomyces orontii
  source 1..2046: mol_type = genomic DNA
atgatgaggtcgaataggatttgcacactattcagtcgtaatacaagtgtgtctggtcacagtgggttacggtcaagtagaaaattttatgccatcttagctccggaacataggtcttatgatgttatagtcataggcggcggacatgctggttcggaggcatgtgcagggtctgcacgctctggagccagcactgcgctcataactcccaagctggataacattggagtttgttcttgcaatcctagctttggtggtattggaaaagggactttaatacgagagattgatgctctcgatggagttgctggcagaattatcgataaggctggggtacagttcaaagttttaaaccgaaagaaaggacctgccgtgtggggtccacgcgcgcagatcgaccgaaatttatacaagaaatatatgagagaagaactggagacatataaaaatctaaatattatatcaggctgtgtagaggatattgttgtatcggagaagaatggcaaaaaaagggtagaaggggtccgattggaatcaaatgagtatatagcagcaaataatatcatcctaactacaggaacctttcttgggggagaaattcacataggtcttgacgtacattcttccgggagaatgggcgaagcagctacatctagtcttagtaagttcttacgaaactctggcttctccctcgggagactcaaaactggaactccaccacgattagctaaagattctattgatttcagtgctatggaagagcaacttggcgacgaaccacccacgcctttcagctacctcaacgaatcagtctcggtccaagagcagctgaaatgctactcaacatatacaaatgaggcctcccataatattgtcagggctaatctcgacaaatcaattcatataagggagtcggtaaatggaccaaggtattgtccatctcttgagtcgaagattattcgtttcgccgacaaatcaaaacatatgatatggcttgagccagaaggcttcgaaagcggagtgatttacccgaatgggatatcgatgacaatacctagcgaagctcaagagcaactgttaaaaacagttcctggtctcgaaaacgtcgtaatgctgcaacctggatacggcgtagagtatgattatgttgatcccagaaacctgaaatctactttggaaacaaagttagttcaaggtttatttctagcaggccagataaatggtactacaggatatgaagaggccgcttctcaaggaattattgccgggatcaacgccggccttgcatctcaatcaaaatcgccgtttattctctcgcgtgtagatggatatattggaatcatgattgacgacctaattacgaagggagcttctgaaccataccgaatgtttacttctcgatgtgaatatcgtatgagttcacgagccgataatgccgacatacgactcacaaaaaaaggacgtgaggccggcatagttggagacagacgttggagtagcttttctgatgaagcgactcagttagagaagcttacggccatattaaaatctaagatatcgagctatcccctgtggatgaacgctgggtttaaaatttcctgcgactcaagtaagcgaagcgcatttgagattctacgtctaacaaatgtttctcctcgtgatcttgctccaatagttcccgaaatcaatgactatccacaacgtatccaaaatcgagttggaattgaatcaatttatgcaccatacatagctcaacaaacagcagagattaaacatttcaagaaggaggaatctttaaaattgccgctagatcttgattatcattcgattttcggattatcactatttgaaaaggcccagctggataaaaccagaccagagtcattgagtcaggctagacgcatcgaaggcctcacaccggcaggaacattgcgcttattggcttatgttcaaggtcgcaatcgtagcttggctcgtacagcagctttaagtaaggattttgccaagcaagatgaactgtctactcctagtggtcagtcaacctag

SEQ ID NO: 298 - DNA, 327 bp, Golovinomyces orontii
  source 1..327: mol_type = genomic DNA
atgcccgatcgacctcctctcatcgatgaggatgagttcactgaagtttttcttaaaggcagcggtcccggaggtcagaaaatcaataaaacctcctcggctgtacaactccggcataaaccgaccggtatcgttctcaaagtccaggagacgcgctcgcgagagcaaaatcggaagattgcccgagagaaactagctctgaaagtcgaaatgatacaaaaaggaaatgaaagtcgtctagcagtcatcaatgccacaaagagtaagaggaaagcgagcgcctcgaaaaagagcaagagaaaatatcggatgttagaggagcagaag

SEQ ID NO: 299 - DNA, 2118 bp, Golovinomyces orontii
  source 1..2118: mol_type = genomic DNA
atgacgccgaagccgtatcgatctccgccacagccgccgccactttttaccgcgacagttgattctctcatagcagattctaaaacgatttgcgatgagataaaggcttcacttgacaagattgtagcagatgtctccccggagaatgcaaacttcgcaaatactgtcaaagtcatggcggaggttgataatttgatctcattgcggacgagaataattagcttttatcaggctgttagtaccgatgctaaactacgggatgcttctagtaaagctgaggagataatggatgaattcggtatcgaggcggcgatgcgagaggatgtcttcaaacttgtcgatgctgcatacaaagcatccaaagataacgaaagtaacgagatcctaaatcctgagagccttcggttattagataaagagcgaagaagcttcattcgtaacggtttaggtatcgaaaagggcgagaaacgagaccgatttaaagatatcaaaaaaagattgagtcaattgcagatagagtttcaaaaaaatttaaatgaggagaatggtagtatctggttttcaaagggtgagctagatggggttcccgatgatttgttagaaagttttgaaaaagggacaggtgccaacgagggcaagctacgagttacatttaagtatcctgatttatttccttgcctaaagtttgcaagaaaatccgagacgaggaagaaaatcagtatagaaaatgagaacaagtgtaaccaaaatgtcccgctttttcgagaaactattattcttcgagatgaggcagcacggctcttggggtattccaatcacgcagaatttcagttagcagataagatggccaaggatccagcgacggtgaatgacttcttgaatgatctacgaaaaaggcttactactggaggtgtgaaggaagttcaacatctgatggagatcaagaccgaagaactcaaaaaacaaggtcttgaaagtactaatgatggtaatttttatctctgggattcgagatactttactcggatgatggtcgagacagaattctccgtcgacgaaaccaaaattgcagaatatttccctcttcaatccaccatcgcgggcatgttgaagatatttgaaaccctttttggctttgaattccttgaaattgttggcacagatcgggataagatatccagtacaggcaaaggtgacgatattgtatggcacgaagatgtcataattttcgctgtatgggacgatgaaggagagggtggcgggtttgtaggttacctttacttggaccttcatccacgacccggaaagtatgcgcatgcggcaaatttctctcttcagcccggctttacctatcctaacggtacacggagataccctgctacagcattggtctgtaatttctcgaagcctagtaaaaataaaccctctctattaaaacatgatgaagttgttaccttatttcatgaattgggtcatggcattcatgatttatctgcacgaacccaatattctcgatttcatggaacatctgttgttcgcgatttcgtagaagcgccaagtcaaatgttagaaaactggtgttggaccgattcacagctcaaatctcttagtagccattaccttagtggcgaaaaaatccctgatgacttaattgagaaactagtcagagttagatacgttaatgctgcacttttcaacctacgccaactccactttggtatatatgacatgactatacatactcccaaagaccatgaagaagtaaatgcattcaaattttccgagttatacaatcaacttcgtacgcagatttctggcatcaaaggccctgaagacttgggtatgaagagtgactggggaaatggtcaagctacgtttggccatttgatgggtggttatgacgcaggatattacggatatctgacaagtcaagtttacagcactgatatatttgatagtgtcttcaagaaggatcccacagatgggaaagaaggtcgtcgctaccgacatatggtacttgaaaagggaggctcccaggatgagatgaagacgttggtagatttcctcggcagaaaaccaagcaacgaacctttctacaaagagcttggtctagcatag

SEQ ID NO: 300 - DNA, 2844 bp, Golovinomyces orontii
  source 1..2844: mol_type = genomic DNA
atgccattacggccccctcggttgtcatggtcgtccacactgcgactaccgaagtcaacctttctagcgcgtccgaagctagcggatcaggcaaactacttgaaacgatgctctgatgacctgtatgaatggcaaagtcaaaactacaaagattgtactccgtttctactgcttgatggaccaccttatgccaacggtgaattacacattggccatgctttgaataaaattttgaaagatattacatgcagaataaaagtgcagcaagggagaagagttgtctacgttcctggttgggattgccatggccttcctattgaaatcaaagctctcgaacaacaacgagtagtcaaagatggcaatggagctcttgatcctgtcggtgtcaggaaaattgctcgtgatctggcttctaagactgtcaaaattcaaatgaagactttccgggaatggtgtattatggcagactgggaccagtcatggaaaactatggataaagaatatgaaatagaacaactgaaaatatttcagactatggcacaaaatggattgatctcccgtcgatataaacctgtttattggtctccttcttcacaaactgcgcttgcagaagcagagctcgattacaatagcgaccacatctcaactgcagcgtatgttaaattcctcattactactattcccgagaatcttagaaacgtcattccaattgacgcaaatctatctgccgttatctggacgactacaccatggacactacctgcaaatcgggccattgctataaattctgagttagaatactctatagttaggcataattctgagcttctgcttattgcgaaagttagagtggaagaagttatgaaattgctctcaaaaggggaacctatagatattgtgatagatagtatcttgggctgcgacttaagaggtgcccagtacaaaaacttgtttagcgcttcagatttatttccaattatccatgcagattttgttacagctgacactggctctggtcttgttcatattgcccctggtcatgggtatgacgactatgaagtatgtgcttctctaggaattgaagcaactgctccagttaatgatctaggttgctttactgctgaatcttttcctgcagatccatctgcgctagaaggcatatctgttctgcatggtggtgatgcccaagttttgaaaatcttaggagacagaatacttgcttctcataagtttaaacacaagtatccatatgattggcgcactaagctacctgtcataattagagctacagaacaatggtttgctgacgttggaactatcaaaaataaggcccttgattatataaaaaaagtagactttattccagaaactggtcgagctagacttgaaagctttgtgaaagatagaagcgagtggtgtatctcgaggcaacgcgcttggggtgttccgattccagcattatacgcagatgatggaactgccattctcactaatgaaagtgttgagcatattatttctgttatcatcgagagaggcattgatgcctggtggactgatgccccagatgatccagcatgggtcgctcctgggctgaaaggaaactttagacgcgggaaagacaccatggatgtttggtttgacagtggtactagctggagccaaatcaacggtcaagctgatatctatctagagggaacagatcaacatcgtggctggtttcagtccagcttattaactcatacaggagggtccggaagagattgtccaccttttaaagctttaatcactcatggattcacacttgaccaatcaggaaagaaaatgtcgaaatccatcggtaatgtaattgccccaagccagatcatggacggctctcttctacctcctgtaaaaacaaaaaaaggaatgactcaagctagtcaagcactaggcgcagacgcccttcgactttgggtagcaagtagtgattttactcgagacgtgatggttggtgaggctgtaatacgatccaatcattctgcccttttaaaattacgcatgattattaaaatgctactcgggtcaatgcatcccccgaaagaagattttcagattaccactctagatcatattgctctcattcatttagagaaagtaatgaatgaagttgacgttgcatacgagaactatgaatattaccatgccgtaaaggctattggtaaatgggtcagtacagatctgtcgtcattttacttagaagcaatgaaagatcggttatattgtggaaacggacaaagtgttttagatgacatttttcacggtcttctgaaaatgttaacccctataactccactcctagttgaggaagcttggtgccatcgccctcattggatggtggttcgaggtgatccacatccattctacaggacaccatccaacccaatcataagtgaaaatcgacgtctagcgcgcgatccttccatcgcagaagatttaccatggataacgaatgctgcaggagcgattaaaatagcccaagaacaggctcgttcacagaagctcatcggctcctcacttgaatcctcaatcatcttagaactaccctcttccgcaattgttacattcaaccgctacatcaatgaactggatagcatgtttgtagtctcttctgtcaagctaggtacaagtccaaaaagtggctggaaattttcttcaaattttgatgtaccaggtggacaaggtactgcctgggttatggctcctgaaagtcaaaaatgtcctcgttgttggaggtatctctcacacaaccaagataaattatgcattcgatgtgaagaggttgtagccaacatgataactctataa

SEQ ID NO: 301 - DNA, 1863 bp, Golovinomyces orontii
  source 1..1863: mol_type = genomic DNA
atgcccccaaccaaccatgtttcaactgagcaaagtgtttcacaacttgtattgccagaagctccttcaacttgggaccgaatatctagatgggcatcagagaacaaagctgtgatatatacagctgctggagttgcaattattgtaaccggtgctagtgtagcatattatttaattgattcgaaaccctcttcatctattcaaaatcctcagaagaagttaggcaggaaggataggaaaaaaaaaagggaagatggttccaaaagtacagattcacataaaaaaggagcagaatccaaatcaaggacgacaacgattgagccagcccttgaactgccacaagtgaccgaaaagacgattgaaagttattctgaagaacagagaaatgatttagcggtgaaattgaaactagcaggaaattctgcgttcggttctaaagactataccaaagcaattgatctctatggccaagcaattctctgtaaagcagatccaatattctactcgaatcgcgcagcttgttacaatgctcttcaagaatgggaaaaggtcgtagaggatacgactgccgctatagatttagataatgaatatatcaaagctctgaaccgtagggcgggagcttatgaacatcttaacaagtttaatgaggcattgctagactttacagcttgttgcattattgatggctttcgaaatgaatcaagcgcggaatcagttgagcgattacttaagaaagtggctgaagtcaaaggaaaagagattctcgcaggtaagccgaaaagattaccaagccctacctttgtcacaagttaccttcaaagttttcgggctcgaccacctcctgagggattagagacaaccgtagagatttcagaagataccggaaaagggcaattgcaaattggcttaagtgcaatgcagacaatgactgcagatgggtacgaaaaagctgcagccgcatttgacaaagcattagagctgaatgatctcgaagattatgaggcctttgcgtataatatgcgcgggactttcagatatctccgtggagaaagtactgaggcgctaagtgatctcactaaaagtgttactcttaagcctgaattaacacagagtttcattaaacgggctagtatgtacttagagctgggcaacaaagaggctgctgttgaagactttgagaaggccatgcagcagaataacgaagaccccgacatcttctatcatcgtgcgcagctatactttatccttggtgaattttcagatgcatataaagattatcagaagtctattgatttagatcggtcctttgttttctctcatattcagctcggggttacccagtacaaaatgggatcaatagcctcttccatggcaactctccggagatgtataaaaaactttagcaatgtaccagacgtctacaacttctacggggaacttctattagatcaacaggactatcaaaacgctatagaacagtttgacgcagcaattgaaatagagaagcaaactaaaccaaacaggacgaatgtgttacccctaataaacaaggcattggccctcttcaaatggaaacaggattttgtagaagctgagaagctctgcctaaatgctcttaacattgatcccgagtgtgatatagccgtcgcaacaatggcacagtttttacttcagatgggtaaagtaacagaagcacttgagtattttgaacgtgcggcagagttggcgcgaactgagggtgagattatcaatgctctgtcctacgccgaagcaacgcgaacccagattaccgttcaagagaagtatcctcgacttgccagtcggctacagggtatgagcccaggcgttggcctgggctaa

SEQ ID NO: 302 - DNA, 1506 bp, Golovinomyces orontii
  source 1..1506: mol_type = genomic DNA
atggagtttcccaaagttatacacgctctccaagactcacgagcaaccaaaactggtcgaaatttaatcatttgccttgatggtacaggagatcagtttgataatgacaacagcaatgttgtcaactttgttgcatgtttaaagaaagacgacccgcaacaagttacatactaccagtctggaattggaacatacaatgaaagtggcttgagaggtggtatttctgccataatcgacatgtctattggtagcggtcttggtatacacataaaagatgcctatcgattcttaatgcaaaattatcgcgagggagacagaatctgtctgtttggtttctctcgagggtcatatacagttcgatgccttgctggaatgctccacaaggtcgggcttttaccagctcataacagtactcagattaattttgcttataacttttacaaggatgactccccagaaggatggcgtatgagtggcgacttcaagaaaactttctgtgctgatgtgaatgtctatttcgtgggtatatgggactgcgtcgctagcgttggcttcattccaagaaaactacctttcagcaaaagtcctacaaataatatcggatattttaggcatgcaatggccctcgatgagcacaggtctaaatttaaggtctgccctcagaatatagctgaaaattccgagtcatctgataagtataagacggcttcgacctctctattaaagcggatttggacacttcctcaatttggaaaaactaatgacaaggatttgcctggaagtgattcaattaatattcgaggcaagagagccaggttaccaacagacgttttggaagtgtggttttgtggtggtcatgccgatgttggtggaggggctgtaaagaattcggaacgccacgtgctcgctcgtattcctttgcgatggattatcagacaatgctttgaatgtaacactggtattctcttcaatacagcagccctagctgaaactggcatcgacgttcaaaacgtatggcctgtttacaagacacctacaagacctgttgtgggcccttctccaaatcatctcaacaaatatttgacgggtgttattccaccactccacaggagatcgaccgctttaggattagagtccactaagagtgaccatctagatgaggtgttccctgatcatgaagaattcgagggtgtcaaaacgaatgtgatcgataacttgctaccagagcaatctgaagactattttgatgcaatggcccctataaatgaccagctgaagctagctaaagggtggtggttgctcgagatgtggcctgttaaaattaggagacagaagaaagattctgatgagtgggaaaaggtggtaagattcaatattgggagttttcgggcaatccgtgaaacggaaccgaagatgcattggactgttgaacagagaatgctagacaaaggatataaaatcgaagcaagggttcataggcaggcccactggaaggttgttgtatga

SEQ ID NO: 303 - DNA, 960 bp, Golovinomyces orontii
  source 1..960: mol_type = genomic DNA
atggccgacaagatggcaaagtaccggacagaaatccaacagatgatgtatgtatcaggggagacagcagaggcatctgcggagacaacaggtatgatagaagagatagtcagacaacaggttatcgaaatgctacgacaatgtactgagcaggcctctcgtcgtggatcaagatctatctcaactgatgatcttatattcctcattagacatgaccaggcaaaggtgtctcggctacgaacttttctttcttggaaagatgtacgaaaaaatgtgaaagattcagatgataaaggtgtagatgctgatcttggtactggagatgagccagtaactgcagtggctggagggcctgttgttgacaccgcgaaaaaaaacaagaaagcaaaggttggactaccgtgggaggtgccttctttctataatcaagaagttcctgaacgagaagatgaagaggacgaagatgaagaggaaatgaactatgccacactccagcggcttaaaaaagctgatgaacgaacaaaagtcatgaccaaagaagaatatgttacttggtcagaatatagacaggcatctttcacttttcgaaaaggcaaacgcttcaaagaatgggctggatttggtgttgtcactgactcgaaaccaaatgatgatattgtggacattcttggattcttgacatttgaaattgtacagactttaaccgaagaagctctcaaaataaaagaacaagaggatctcttcaaggaaaagacgggtggtgaacagagtggtaagaaacgaaagatccaaggcttgttcgatcctccttccgaaggacacacgaccgtagagcccagacatattcaagaagctttccgacggcttcagcatcgttccactagacagcgtgcaatgtgtaatttcacgaggggacttaaccgtacatcactgaagctagtaagtatatttatcatgtaa

SEQ ID NO: 304 - DNA, 513 bp, Golovinomyces orontii
  source 1..513: mol_type = genomic DNA
atgaccagcaaaatacaaaaaaatattttggagcatcccgaggcagaagcatcgcctacctttctactagatgagacgaaaacctgctattccgttgacacgaaaaactgctataatggccggaaaggagatttcgatgcttggacgggaaaatttgagcctataatcgaagtggcacacgaaaagaagtcagcttcaatattaagaggggacccatcatcagctttaacagatgtgggagttaaaattaccaatcgtctctcaatgacttcttcgcctgacttaactccaacctatagagatgattctgaacaattcaccgccactctctgttctagaagccaacaggatggctatgaaaatgatttacatgacaagttctggcctcttttagagaacagcttcccaagccattcaagatcattttcaaaagaatattaccccccagcccatatggagtattattttcaggaagtagacgcagggtcaatcagttggcaagatggagtgtag

SEQ ID NO: 305 - DNA, 2490 bp, Golovinomyces orontii
  source 1..2490: mol_type = genomic DNA
atgggaatcaagggtatctatggagaaattggtgcgggagaaagaatagcactttctaagcttgcagtagataactacgagcagaaaggtcgcccattcagagttgcaatagatactgccatttggcaatttcaaactcaagctggacgaggtggttcaggttcagcaacgcgtacattttattatcgcctcatacgcctgcttgcgttgtctattcagcctttgtttgtttttgatggtcccaacaagccgcctttcaaaagaaataaacgtactggatcaaatggcggctcggtatcgaatctgctcatcaaacagatgttgactcattttaggtttccttatcattgtgcgcctggagaggcagaggctgaatgtgcactgctacaactgaacggtatcgtagatgctgttctcagcgaggatattgatacattgatgtttggttcggaactttgtcttcggaactggtcttctgaagattgtagagggaatcactcgccgactcatgtctctgcttactacaagaaaaccgtaacagaaagatatggtcttgaccgagaaggcatgatactagttgcgctaatgagcggtggcgattacaatacggaaggcatccatggatgtggaatcaaactggcttgtgaggctgccaaggctggatttggaaagtctctttgtaagatatcacactcagacgtcactggttataactcttggagagaagaattatcccgcgaaatcttctccaacaatggcaaatttttcaaaacgaagagaaagacgatcaagattcctgaggattttcctgatcgaaaaattttaggctactatacccatcctgtcgtttctaatgctgctaaaatttcaaagctcaaagaagaaataaaatggcacggagaggtggacgtaccaggtctacgtcgatttgtcgcagaggctttcgaatggacaaacaaggctggggcaataagatttacacgtggtcttgcaccagccctttttgtccataaacttcggatatttggagagacgagatgtaacgaatttgatgacattgttctgacgtctatgaacgagacggaaattgtccgaaccatatgtggtagaaggacccattttagtaccgatggtattgtcgaattgcgcctagtataccatccattagatatagttggcctcaacctagatgatgaagaagatctgcaagatagctttggaagagatgggctagcaccacgtaatgctgaggaccgtattgaagtgtatctttccaacgaagagggaagatcaaaaagcccaatagataattcaactacttatgatcctactcaacccgataaattgtgggtgcctcgagctattgctagggttggtgtacctcttaaagtagaagattatgaggagtcctttcgaaacccagaaaagtttctcaaagctaaagcggcgggcaagagagctctttcgaaaaaagaaactcagaataaagccatcgtccagatgagtaaatcttccaagtcaagagaaacctctaaagctctgccgcagtccagaccaagcaagtctctggcatccacaaatcaacccacatctcacttgcgtacctgtgctagtatagaaaagcaaatgggcttaaaaaaacagactaacgttccaccaaagataaaaaaagtctcgaatacgatgaaaatcaatcatcccattcaaaaaagccctacaacaaaagtcaagctcaaagttaagaccaatgagacttttagatcaccgtcgcccataagcttcagctccccaatttcagcttcatcagatccattatcgaacagagcccctcttttttacactccccaccttttctcgttgaagacgagaaacttaccaaacaagagtgctcaacatttttacttggaatatcaatcgaaaaatgtgcacaagaaggtaactttaacaagacaagcttcaccgactaatgaaaagccctcagatgataaatatgagcttcacgaccaaaatgacgatctgtccgagatatcggctctgcctccgattgacagaagaaaaacagcaaaagatagttcacctcaaaaatcacgccctttcttatatccgattgatctatctgcttcaccagatatgctagcttcaacgtccacaaaaaagagtcacaaatcaattgtcaaccctaaccttcctgctgatagctgtattctctcgcataatcatatcgagaataagagtgaggtaagaccacctgggttcctttcacgtgtcaaatctcctagtccatatagagttcagaaaaaaataatagcgctacgtgaaagtttaccgggtgcttggaaattagtcgatgatattagtgatagccaagtcggtgctcaaccaccaaacgaatcgggaaagaaattattaaaagaaaaatctgctagaggaggttctcgttggcgtatgagtgagattgaatttttagatttgacggccgagcaagcctga

SEQ ID NO: 306 - DNA, 1119 bp, Golovinomyces orontii
  source 1..1119: mol_type = genomic DNA
atggtctctgcgcctggtaaagtcataacatttggagaacatgcagtggtttatggcaagaccgccgtcgcagcttcgatctccctgcgctcctatttacttgttacctctctttcaaagtcaaagcataccgtctctctccagtttcctgacatcggattatcacacacttggaatataaaagatttaccatgggaagcattttcccatccgagtcactgcgctcaacccggaacttatatcggctctgggccccatctaaaagatatctctcccgccacttctgacgatgttcggaaaatacatcagaatgctgcaatggcctttttatacctgctggtttcacttggcgcgccaaacttccaagggtgttcatacacactgcgctctaccataccgataggtgctgggcttggtagcagtgcctcaatcactgtttgcttagctgcagctttattattacaaataagagcactctctggtccacatcaagaccagctgtgcgaagaagtgcgcacacaaatagagagaataaatatgtgggcttacgtcggcgagttgtgtatccatgggaatccatctggcgttgataacactgtcgcttcgcaaggaaaggcggttgtttttcagagactagattactcaaaggcgccaaatataacatctttacagaaattccctgaactccctcttcttttaattgatacaagacaaccaaaatctacggcggttgaggtagcaaaagtagctgctttgcaaaaaaaacatcctaaaataattgaatctatattaaatgctattgatgaggtttcccagggagctgccaagatactattggatagtcaattcgatactgagagtcctgaatgcatctcggaattaggaagattaatgtcgttaaaccacgggctacttgttgctttgggtgtctcacatcctcgtttggaacgagtgcgggagttaatcgatcatgaaggattaggatggacaaaactgactggtgctgggggtggaggttgtgctattacactacttcagccaggcctttctaaggagaagaaagtaatgttagaagctaacttaaggcagaaaatttcggcatatttgaaacaacattag

SEQ ID NO: 307 - DNA, 1041 bp, Golovinomyces orontii
  source 1..1041: mol_type = genomic DNA
atgaagaagacgaattccaacgttactccaataatgttccatcatttccgcttgttaccacccgaactgagagttaagatatttaattatgctatgcctcagccttatgttattcctttgagcgtctcgtatacggaggggggagtcaatttctgtacgaattatgatgatggcaatgatagagacgaagaggatacgcaagatgacagtgattacgatgaaaatgataaagaaacagaaaatagtcgaaaaaacataggcgcggatgcaaaaaattctagattctttcttccattgatcacgaaagtctatgcgcgtggcatctctcacacttgtcgcgagcttcggaacgtctatctcaatgcttttcccgatacgttggttctaagtaatgaaaaaggagttattagacttaattatcgtacaactatcatctaccttcgtcagtaccagaaactggttgaccaacctacaattagtcattatttatttgaggatgttagcaacaaatacggtaacaatgctagattaagacgtccctctgatgtcttacagttccctacattttttagcctcatcacccaactcgctttacccattgattgtattacagaatatcctgaagcctcagcacacccattttctctttacgaatactcggtcgaaggtgggctgtttgcgaaaatgatacagccattcacggcccttcgctacttatgggccgtggctgatgatacatattggcaactagacataaccctcaccctcaatggattttttcagccttatccttatcgggctgatgtttctgttcttggattccttgctgaaagaaaagaacagctagcaaactggactgaatatattaatgtcataattaagtgccaggctatcttatctgcagttaagtctaatcaggccgaaaataataattcatcaagagtaccaccagatattagggtagagacttattcgccaccagctcttatgatttggggaatggaggaaatcgatctctgggatttcttgtgcgaacactaa

SEQ ID NO: 308 - DNA, 2655 bp, Golovinomyces orontii
  source 1..2655: mol_type = genomic DNA
atgtcagacatctcagaagatgaaaatcctctctcaagaagaagaataagaaaatcaggaataaactctagtaccatggagacaagtgacatgaacaccgaaaaatctagttccgaaagcatagattcaagcgcccctgctggtgtttcgattcgaaatggaccagtccttgagaataagaaggctaaaagtgctgaaaaaacaccgaacggcactataaagcgcaaatctcggagcagcgcaacaaaagtcaattataatgatagtgccgatgaagatagcgatgaaatgccattggcgaaacgacggaagaaagttaatacatcttatgactccagcgacaatacgccgcttgcatccaagagaaccggaaagcttccaccaaagctcgctgcttctgattttcctacgtcaggagatgaagaagataaacctctcaaacttaggttatccaaaaaaaaggctgatatcgaaaagtcagctgcaaaagaatcacaggcaattcgttcaaaagaaaaaaaactcagtcctaagaaagtgacaaaagccgacgtgggttcgaaaaaaaaacaggtgtctaattcaggagctcgatcaaaagtgaatggatctaccaaagcaaaatcaaaagcagtaaaacaagaaaatttagatgtgaaagaaccaaaaacagaagataaaaacagcgaagatgccgaagaggtctacaagtggtggttggaggagaaggatgatgattctatcaaatggacgaccttacagcataacggtgtagtatttccacctgagtatgaacgacttccagaaaacgttaaacttctctacgatggaatcccagttacactctcaatcgaagccgaggaaatcgctggtttttttggagctatgctgaacagcactctcaatgttgaaaacccagtgtttcaaaataatttctttgaagattttattgaagaagttaagaagactggaggtgcaaaaggaccgaaaggagaaaaacttaagatcaaggaattttcaaaacttgatttcaagcaaatattcgcatactatgatggcaaggcgcaagaacggaaagctaaatccagtgcagaaaagaaggctgataagaccgctaaagaagccattgaagcaccatatactcattgtatttgggacggaagaaaagaacaggtcggtaactttcgcatcgaacctcctggacttttcagaggccggggtgctcatccaaaaacaggaaaagtgaaacgccgtgtcatgcctgaacagatcactattaatattggaaaagaagctacagtacctacacctcctcctggccataaatggaaaggagttcatcatgataataaggctacctggcttgcgatgtggcaggaaaacataaatggtgcctacaaatatgtcatgcttgccgcgaaaagtagtatcaaaggacaaagtgactataagaaatttgaaaaagctcgagaattaaaaaaacatattgatcgtatacggagagactacacgaaggatcttcactcagaactgatggcagatcgacagagagctacagccgtttacttgatcgataaatttgccttacgtgccggtaatgaaaaagatactgaaaatgaggccgaaacggttggctgctgctccttgaagtatgagcatattacgttgaagccaccaaacacagttatctttgattttctcggcaaggatagtatcagattctatgacgaggttacggtagatgcgcaagtattcaagaatttaaagctattcaaacgacctcccaagtcagacggtgatgatatttttgaccgtcttaatacaacacagcttaacaagcacttgacaaactacatgccaggactcagtgcaaaagtttttcgaacttacaacgcttcctacactatgtccactctcttaaaggaattaaaaaatacagatttaacggtccaggaaaaagtcaagctctacaatgactgcaaccgaaaagttgctattctgtgtaatcacaaacgaactgttggagcgagccatgaagctcaaatggaaaagatgacagatcggatcaaaggtcttcaataccaacagtggcgtctcaagcaaatgatcttagctattgattcaaagcaaaagaagcgtatgggagcaagttggtttgacttaaaccaagatctcgatgtggactggattatcgaacatcaagcctttctcgtcgaagaattgcgtaccaaaatagaaaagaaatttcacaaggaaaatgagaaattgctttctgatggtcagaaagaaatgaaggctaaagaactagaagagcggcttgaggtagctaaagaattagagaaaaagtttaagaaagaaaataaagtaaaaaaagttgagcctgaagggaaaggcgcaaccgtagaaaaatacatggcgaatataactaagcttgatgaacgaattgctaatatgcgcctacaagctgaagatcgagaaggaaataaagaagttgcactcggcacgagcaaaataaactatattgatccgcgcctcactgccgttttcgctaaaaagtttgaagtccctatcgagaagttcttttcaaaaacacttcgagaaaaatttatctgggctatcgattcgatcgaagatgatgataactgggaattctaa

SEQ ID NO: 309 - DNA, 1332 bp, Golovinomyces orontii
  source 1..1332: mol_type = genomic DNA
atgacactcgataacaaatccaatttatctgaaagtcccgaaaagaacagcgaaaaacttaaaactcatctcgcgaagacaagcaaatccacctctccaccaaccaaacccaaagaaattgcttcgtctcgcactcttagtcacaggtttgggaagtcccaggaagatacctcgcgaactcgaagaagtggcgctggatcttcgtctgggaagtcaaatgcaattgggggactagatatattctctggctccctcaaaacctcaacccattcaccgaaaaaaattgagccgcgaagagcacgccgaaactctgattcttcgacatatgagcgctctagcaagccccttgatcctgaagaagaaaagaagcgtcaagaaagaaggtctcgcgacagaaagccgcgagagcataacgacaaagattcaaagcctaggagacccaatcgtaaattagatgtgattgacaaactagatgttaccagcatttatggtactgggttgtttcatcacgatgggccgttcgatgcttgtaatccccatcgtaatcgacaaggaagtaaacgtgctcctatgcaggcctttcctaaggattcgcttaacaatgtattaggaggtggcggacctatcaatacaagacccgatcatgctttgtttttgggaaacaaaaatgaagaagctttcaatgattactccaagggtagtacgagcttcaatgaaactgaatcatatgataatagtttaaattttactggaaacagcagacaggagtcaaatgtactgagcgccacaaacagggtggagcctatccatggtgaagagacactcggattgggcacatctacatttttagaaggggctccagcatcacgaaatgcgatgcaacgtcgagcgagcgagactgtacaggttgatttaacattatctcggtctaaatctattgcacaaaagtttcgtggaataaatgttcctcgtcgcgaaataaactcgcgaataacagttactgataacccgctgtcgccagaaattcgaacttcaggcagtggtaaaaatgagcgaggtctaggtcttttttttgatgaatctcgaaaaagtgaagatgcaatggctcattcaaaaaaggaaaatattgttactatcgctgaacccgaaagaaattcgattcatactcaatccggtaaaatccctcgacatatctcattactagatcatcatcttcacaatgatggaggcggtgaaatcatgacaggaaaaactgggattggtttcatgagccgagttaagtcattaaagggtggtcctaggaagatgaaggccaatcctattgaatcttga

SEQ ID NO: 310 - DNA, 1356 bp, Golovinomyces orontii
  source 1..1356: mol_type = genomic DNA
atgaagttttcacggatgacccttctggctatattaaatcttgctttggcccagccacacaaccactttcaccttcatcatgctaggcacggttcttcgaacttcgaacgtgaggaagcctcagcagcccaaatcgataatgctgtcgtaactgtatatgagctggacggacaaaagatatctcacgatgatgttgaatcctgtctggaagagtcgaaatgcgtagtagtaagcaaccagatcaaaagtttaccgactgatattacaagggctaagtctggagcacatgacttaactccaaacaatactgccgatagcgggcgccctacccctaccgccttggtgtcccctcccgcttctagcgaattatcatcgagaccctccccggtaaaatctgtctctccaataaaaaatgattcagaagtagttaaaaacttcattgatccacctcacccaataactggtaaaattgactgttctcactttccgaccgagtttggggctatatcggctgactggatcggccttggtgggtggacaggggttcaaaaaacacccggatatagtttgtcctcaaaagtaatcagttacatcgaaactgccacaccaggagagggatgtgtacctggttctttctgctcatactcgtgccctgcgggttaccaaaagtctcaatggcctgatgcccaagggtcaactggtcaatcaatcggaggtttatactgtaacaatgaaggaaagttggagctttcacgaacagcaagtcgccaaatctgcacccctggcgttggtgatataaaggtaaaaaactcacaccacaagaatgtcgcaatatgtcgcaccgactatcctgggacagaggccgaaacagtcgcgcttgatgctcttcctggatcgacggttaaggtcacatgcccagatgccaaggaatattatagaacttgggagggtgcgccaacttcggctcagtattatgtgaacccctctggttatgacgttaaagatgcctgcacatggggaacgcctggatcgaacattggtaactgggctcctgtcaatatgggtgtgggtaagggtgatagcggttctacttttgtgtcactcttccctaacacgccaactaacccaaatggtgtcctggacttcaacattgaaattaccggggatgttaccggccagtgtgcttatagaaacggaaattactatagagatgggattatctctccaactggatgcactgtcggtgtgaaaggaatggcagttttgaattctcctagaacacaaaattcagggttttctcttacagccaacctccttactgcttggtctggttggaacccgtaccagttcaaataa

SEQ ID NO: 311 - DNA, 840 bp, Golovinomyces orontii
  source 1..840: mol_type = genomic DNA
atgctttacctaaattgcctacgatctctcagcgtcctcgtcgttctttacctttctctctctcaggcgaattggcttaattataaaaaatttgcccgacaacactctgaacgaagaatccagggaagacaagttgatgcacctgtcaatgaacctccaactacaaccacgagcctacgcggaactgggatagttggccctccagcaacaacaactccatcgccaacctctgtggaaaccacatcaagtgcaaagacttcagcgaaccccgaatctacttccgctacaccaacagccacgacctctactaccagagcaataacagctccaacctctccgaaaacctctacacgacaaacaaccaccagtgtatccaattccagcaccaatacaccaaccgttgagacatcgaccacagttgaactaattacctctgttgtcactgtatcgggtagcatcattacatctgttacatctgttacatcttccacagagatgacagagctacctcctcaacctaccggtggttcttctccaacgaacgaaagtaacaataataattccgctgttatgactaccagaacaaggaatagtataattggtgctgttgttggagttggcggtacagccttattagctgtattgtttttagtcgcaagaaaaatcaggaagagaaaaaagagtagtggatatgatcctgggctttccgactttggttccggaaccccgcctcacgaaaagacctctggagttggaaatcatcgacctgtaaatccatttcaaagtacattggagaattatcataatcccgctagggtcaacgcatcatccaatttttaa

SEQ ID NO: 312 - DNA, 1176 bp, Golovinomyces orontii
  source 1..1176: mol_type = genomic DNA
atgtccatttgccattcatccaagaagcgttgctcttccaagaaaaagaaatcatctgagtatcatcacaaaattgagcttatcgatgaaacatcatctatattatctggcgaatcaagaagcgataccttgaaaaaaaaggcaataaatcaatcaccgaaaaagaaatgcagtgttaatctgtactcacatcagtcaccatttcatttgagagaggggtcgactcggagaaagtttgcgaaatatcaagacatcgattcattagaaaataaagatgattccttcttcggtggttttggaaaaaagtcaaaaaaaagattattagagaagcgagatgaaaacgaacaaaccaaatatgctgtagatgttctcttcgaaaaccaaaggggattattttgctgcgggatcccgcttttctcagcaagggctcttggtaaccttgatcctgccccttggacaaatattgctcagaagaccagcgcaactaatatcacaaatgcccagcctccggatccgtcgtgggagtggataggagataattggtcagtttatcatgccgatgaacctggtgaatgctggaaatattctttcgctttcaatggaaagttttcatggcatcaaggacaatggtggaattcatttgtccgaagacgagcctgggttcgcaaaagagttaagaaaaaactggaatacgatgaaaacgaatcatacatattcagctctcacaatcctaccgcatatcttaccagatctcgtcataataatcagttatcgttactcaaaggtaagaatttcagcagctacgatatattctctggcaaacgaaacaccgatggcgaaacaattgaaaatatccatgacattaatactttgaaaatagcattcaagtcagttcgaattgacagagagataacagaagtcgtcaagagttttatcaaaaatggaagcgatgatcttttcaatttgaaagatcagattcatgaaattatgcacttgtttatatttcaggcatcgcgaaattctcttgttgcactcctacgtgagtcgctaaatcaagctcttgagcagagagaaaaatttattaattcacagaataaagatgagagggacaaagttgaggctttaaaatttgctctatgtgcagctgaagacgagatcaggaatttcgagttctaa

SEQ ID NO: 313 - DNA, 585 bp, Golovinomyces orontii
  source 1..585: mol_type = genomic DNA
atgccaactaactttggtatcgtggctcctggcatctaccgcagtagttttcccatctccgaagactttcaatatttacaaagtcttcagttaaagacaatcctctctctcgtcaagaaagatttcagtctcgagtttcaagacttcgttaaatcgaatagcatcaatcatatagttttagatatgatcggaacgaagaaggttgaaatttctgatgtcatgatgaaaaacatcatgagtattgctcttgatcaatctagatatccaattttgattcactgcaatcatggcaagcatcgtactggatgcgccgtggctaccattaggcacgtaaagggtgggagattacgaacactttgcaagaatatcgcgactttgcagctccgaaggctcgggaatgtgatattaattacattactaatcttcaagtgtccactctcggatccgtctttagacagcggtccaaagattcccaaggacatcattactgagcaaatttatttacccgaaaacacgacgcatgctttttctttctatgatactcatattcatgttcatgactctccgttgctctcggaagattaa

SEQ ID NO: 314 - DNA, 405 bp, Golovinomyces orontii
  source 1..405: mol_type = genomic DNA
atggccatgacatttggtcttgcatgctgcgccgtcgagatgatgcatctctccgcccctcgctatgatcaagatcgtctcggtataatatttagagcgtctccacgtcaatcagatgtgatgattgttgcaggtactctcacgaacaagatggcgccagctctacgacaagtatacgatcagatgccggaaccaagatgggtgatttcaatgggcagctgtgcaaatggcggtggatattaccactacagttatagcgtcactagaggttgtgatcgtattgttcctgttgatatttatgtacctggatgtcctcccacagcggaagctttaatgtacggtatctttcagttacagaagaagatgaggcatacaaaaattaccagaatgtggtatagaaagtaa

SEQ ID NO: 315 - DNA, 306 bp, Golovinomyces orontii
  source 1..306: mol_type = genomic DNA
atggctaaaaattttaatgtcaactcaaaaactataacagctcccctagctgcactttgtatggctgcaatcctctttgtctacagcagaacgagtattttagcagcgaaacgaaatgcacaaaagcatcgtgaggccgatggaggtcaactcaattggcacaatgagagcctaagaagacacgggaaattagaaagaccggttcaagagggaactttgggtcaactcgctgcaactatacaggatcgacataaagacacaaatcaaaggccaatattatcccaggacaaatcaagagagatctag

SEQ ID NO: 316 - DNA, 3591 bp, Golovinomyces orontii
  source 1..3591: mol_type = genomic DNA
atggatgcactcaggacatcgctcagcacaccagcgtctagcccagggctgtacaatcctgggaaaacttccgatcacccatatgtttcctcccgctcctactccgatgatacaccacaattaagtccgtacctacatcccttacagatgcacaaagtacgagagacttcaaaagcccaagttgaacaagactttatcaccggccgtaaacttataaaccaatacgaaattatcaacgagatcggcagaggcatgcacggcaaggtcaaactaggaaggagtcttcagactggtgaatatgtggcgatcaaaataattcaacgcttttcaaagaaacgtaagttagggcgagtgacgttttccccagaaggaaagaccaaacgtgagattgcaattctcaaaaaagttcgacatacaaacgtggtaggccttctagaagtgattgacgaccccgagttgaagaagatctacatgattttagaacatgtcgagcttggagagattgtatggcggagaaaaggggctccacaaatatgtctttatgaacgacgaaggcttgaaaatcaacaaacaggtgaaaaagattacagtggtgacgaaaaatattttcgaatgatggatcgacgtcgagctcgcagggctgctaagcgcgcgcagaattctcaacttaattccctatctaatccaaattactggagcttagagcatggccaagatgaagatgatgagttgtcgactgtttcgaaagaaaataccgatggtcctattatttccatagaatccaaggttatatcgaatattggctctcagaattctactcgtgtatcatcaaattcagtctcagctagcgtttctcaggctcacattcctttgcctgttgaatctgatatacctcctattgattcggataatgagagcttagaagacaaccgcctgctaccgtttctgactcttagttctagacatggctcgtcctcgggtcttgatgaattaatacatagtagttgtccagaaaatcaatcttatagggaaagatcccctagtatggcagatagcattatctctcatatgtcctccatagatgatattcctcatgatgcctttcaggaggactactcctatgttccatgttttacacttgatcaggcccgctctacatttagggatactgtccttggtctagagtacttacactacgaaggtatcgtccatagagatataaaaccggcaaatctgctctggaccaaagatcacagagttaagatatcagattttggcgtctcttactttggccgccctaccagagatgatgaaactgaagaaaatatttccgaagctgatgctactgacttcgatgatgatcttgaactagctaagaccgttggtacacccgcgttctttgcgccagaactgtgctgtactgatcttggttctgagcaacctaagataactgaacagattgatgtctggtcgttaggtattacattatactgtctaatttttgctagaattccttttctagctaaagatgagtggcagctcttccgctgtatcgccaaggatgaggtttatataccccgtaaaagactaaaggcagttagacagaacaccagtgtatctcccaccgaagcgactcaaaatagaactagctcgggtagctcatatcgagaagaaaatgagcttgcatacgactttgttgacgacgagctctacgatttgttgaaacggatgttggtaaaaaacccttctcagaggatcaagttaaaagaagttaaatgtcacccctggcttctcagaggcctcgatgatatcattggctggctagatgaaaccgatccttcacgagtaactgctggtcgtaggattgaagttgacaatcatgaactagagcgagccgttgttcctattacctttcttgagcgtgcccggactgcagtgaaaaaggcagttgggaaagtcatcggtgctactaaaggtgatattagaaacgacaggtctcgaaaaagcagacgaagagctcaaagcagtgctactagctctgggaccgactcaaacataacaactcccgttacgccaaacatcagaggtaatcgaagatacagtattcgaggagatgaagcttattttggattttcggctaatagtctcgaaaataattttgagacctatgataatcaattatttgtgcaaaattctacgtcgagtcagagtctatcatcagatttaagtgaggcttctctgtctgggtcacgaagtctgtcacctggagttgttcaagacactaaccacatgtctattcatagtagtgaatctaccttaagaaaaggaataccagagcgcatattcacaattctcacccctaagcgtgccaaattgcagcgtggacacacctattcgcgctctgtcaatagtcctgggaccccaaagttaaaaactatgaatagcaatctctccaaggcatgggattgtttgagagcaagagagtctttacctgacataaaggagagcagcatttctcgtgtacattcagtggaccgtaatttgtttgagtcggaagatatttatgcagaaactaaaatcgacgtttcaataataaactcttccgaaaagattcagcaggcatctaccaattcaggtgaatctcacatgcaggaaacgtgtaaatctccccttgaagagagatcattggttcccttggaaaattttgagcaggaatcttattcggatcatcattcaaatagcactttaactcggattcattctcatactgcaattcataatgtagatgacgaatctactgataataatgagcacgaaagaagtgcaattaaatgtcaacttttagatacaaacatggctcagttaccatctccaagtccggaatgtcttgatcgaaaatttacctcaatcaacatcgatacaaagctagagcatacagtatcttctgactcaatgcactgtgctgattcttcttatggtactttatcgaaattggatgtagtaccgcaacacactaacagccttaatttacaaatcggtcatgatgatttgctgattgatgaagtggtaaataaatatacaaatttaagtgagtttctcactacagatagcatctcatcaccattgatatcgtcaaaatcatctgtcggcttgtgcttaggagaaaaatctttcccatttatcagctcactgcctattctcttacttggggcctcaacagtaacagatgacaatgcatctgtgatgcataataatacagatatatatacttgttcatttggcgaggtgtcatcatcaatgctgattccttctcccatcttgagacgagatttaaatattgatcttagtaattcgattgtacaagaggttgtaactctgaactgtgaggatgaagaaggatataatggagatggggatacaacttcagaatggctagattataattcaggtagtgaagatgatcttcctataatgaagtgtagggcggaagttattccgaagacaacccgcgcaagaaaactcttggggcgaaaaagtaccagcatcaatcctaccagctcagaaatcggaaatcaaaagatttcgatttaa

SEQ ID NO: 317 - DNA, 672 bp, Golovinomyces orontii
  source 1..672: mol_type = genomic DNA
atgccaagatttgcgctgtccaccttcaggtggttcatccgtctcagcggcccctccatgggtcaggtgacctcaacggcctgtttaagcgataatcaatctgacatggtagagcgcatatatttacgtacaggtggtactcatgatgagatttgtcgtccaagggatgataaaaaaactacccgtgaattcatgtccggttcaaacggacaacagttgaatttttttcaagaacagcaagagcaagagtatcgaattgcgaaggcgtggcttgaggcccaagaatgtagaaaagcaagcttacatacattccacaatacttctgcgggatcagagtttgccgaacaagagaaaatatgggccatttctagcactaatagacataaagatcgactgctatgtagctcttcagagaagggtggtcgctgtgaggatacgtcttcaagaataagccgcccaaaaaccgaagccaacgccaatatctattctagatttaatcacacttacagtctcaagagtaagtcaatggtcgatggtaaagaaggcaacactacgaagcagaaacgaatatcaggcctatctggcttagcaattggggtgaaggattggctttgtcgaagggcaaattcatggtattattttttcatttttaaatcttattgttttagctaa

SEQ ID NO: 318 - DNA, 606 bp, Golovinomyces orontii
  source 1..606: mol_type = genomic DNA
atggaatctcaatacaaacttcctcagatcactccagtcaatatatctctaacagagggcactaacatcccatctcctgcagaatcgccagtcgaccaaaccctgcaaaccctcgaagaatgtcaatcaacaattgctgacgaagacagccctccgtctcttgtcgagccgacgacgaacagtacttcaagtcaggaggttgatgaagaacccacgtttaaaaagctcccgttacccaatcctctttcctccaaacgaccaagtagtgttcgaaagtttctttcacgacggtcactaaatgcaaactttctaaacgaatcacacgagacattgaatgtatcccgacctgatagctctatgagctatatgagtgccagtaaaagcttttcgggcggaaagaggcggaattttaactggttaagccgtttttatggagacagcgcaggtcacggatttctcaagaagcgcactagtatcgtcatcgaggaaaatgtaactcaagagccgccagtaccaatgctgcccaaactcagtcagttcaaagcgatgatattggaagatgacggaggcttgggtggtgaagatatcttcaaagacattaaataa

SEQ ID NO: 319 - DNA, 1113 bp, Golovinomyces orontii
  source 1..1113: mol_type = genomic DNA
atggtgaaagaaaacctcatcgatcttgtgtcgtcttcctcaaacctaccaatccaaagccaagtatcctctgagtctaggctctcagttgtcatgacaattgagacagcagaacatgccaaccttacagagacttcgaatactcgaaagaaattgaagtgctttcgaaaagctagtcatcccccgcctgctgatgcttcagcttcgcccgcacctactaccccaatttcacgtcatcattccgacaagacgtcaatttctcggattaagacagttctttcacgctctataaagcgtcagacatctcggtttccacggttttctgaacttcccaccgaaatccgtctcctgatttggggatatgcttttgttcctcgagtccacgaattacacccatgcgcaaagctctataatgaaagaattacgttccgttcgaatagttcgcgaactccatcacttttccacgtttgccgagagagccgagcactggcatttaaaaactacagtctaatgtcatatgagccgcgccccactggatcatctgggaaaggtatattacggttttatttcagtcccgaattagacacccttttcttaaatagcctaatgggactgttcataatgtttatgctactcgaagatgaggatgaatatgccggagtaggtgttatggtgatgaaaggatggcaaaaaatagcgcattgcaggtcatgcaccacatccgaggttaaaagcagtctttccttcactcaaggacttcaccattgcattcgactactcagcaaaaggaaaaatacgcttccgaacttcggtatggccaggagagaatggaacaagtttagaagaagtaatcctaccccgcatctggaggtaggtgaggaacctattaatgggcgggaaaaagattgggcagaacaattaaatacaattctccgaccaatgaggcattatcttgatcttaattttaaggacgaggatgaaagttgtgtcccaacggttaaaatcgcgaatgtgaagaggaaagcttttcttcgaggtgatatacgttacgcatttcggaagacatgtacattatttggcttgaggcctcgtggtccttttcgaaggttgtaa

SEQ ID NO: 320 - DNA, 1020 bp, Golovinomyces orontii
  source 1..1020: mol_type = genomic DNA
atggagataccaaacttacgtgaaaaaccagaatttgaaaccctcttgaccattttagattcgaggttcacaagcaaaatacacatcaattatctctatccagtaaaaaaaatagatgatacttatgatttcctgctaagagttattcgaagtgatttagattggctttcatgcgaggaaaaggacattgtgtacgcactggctagcaagcggattgcagaaaactgtggcagggctgccatgccagggatggaccgaatatggataattccagcaacaagttttcacctcgagattgggttcaaacttcgtgagccgcctctgatcggtgataacttgggtctcaagacctgggtcacatcatttgtcgtatcgaaacaaatcggcaaactagggcatgatttcttttcacacctccttgtaagaaaagattacggctttgactcattgaaaaataacttgccacgacccagcattgaggtccttgagctgggttcaggaactggcttggtaggcatggttgccgctgcggcttgggacgtctcggttcttttaacagatcttgagccaattcaagagaatcttagctacaacatacgtgaaaatctcgatactatttccaggacgtctggtggatcagtctcatgcagtatgctagattggagaaatcccaaggatactttctctgaggaaagaagattcgagctcattattgctgctgatccattgtatgatgattaccatccacttgctcttacaaatactattgatacattcctaaagaaagacgaacgggctcgtatcttaatagcaatacctctccgagacaagcatactcgttacctctcccaggaatttcaacagaaaatgctctcgagacactttgagatagtcaaagttctttttgaatcatgcatagatgaagactgggcaggatcaaagaactacgctgagggagttccattagaggttaccatatggcagcgctccaaacttgaacttaatggctcgttgagctag

SEQ ID NO: 321 - DNA, 1242 bp, Golovinomyces orontii
  source 1..1242: mol_type = genomic DNA
atggcatataatgatgacgcagtattggcaaagctctcagcgttaaacgagacgcaggaaagcattgtcaccgtcgcacaatgggttatgtttcataggcgacacgctgatcgaaccggtcagttgtggctgcagaggctgaaagattcggggagcaacaagagattaaacctcatctacctagctaatgaagttgctcaacaatctaaagcacgtcgcaaagatgacttcttgatcgctttttcacctgttattgcagaagctaccgcaaccgcatacaaaggagctactagcgaggtacaaaataaactacggagagtggtagaagtctggagacagaggcaaatctttgaattacccattcaagaggctattgaagctaggatcgatgagttagataaatccagatcctcctcgactaaacgtggaggagtatcaatattctcatcgaatagtaatgatgtcccaaaagaattagttcctttggttgctccgcagcaagcactgtcaaaattagttctttcaacaatgacttccacaaaagccgccgctcaggattatgaaaaacttacagatcctaatcatcttgtgccttctgctccggttcatgctgcgcgactaaatggacttttaaagactttagcaaatgcggaaggtgctgtagccgaaagcatcaaagcacgacaactactaatcgacggcctggaaagattcctcgatgccaatcgagcagctcttgcagccgaagaatctcagttcgcagaactctcagatcgcaagatagaaatagataacaaaaaaagagaggttgaggaagctatcatgcgtggttttggcacaagcagtaacccacccacaccagccgggggtgattcacctgtcattcatcactctcatgtcacacctgcatcagagccagaccgcccagaagtcgagcccttgtcgcctccagtctttatgaagtcaatagattcatcggctccagaatttgaaggtaatgagaaattctctatcatggaagacgccggaagcagagccgaccagtctacagccgctagctcatcagaggttcatcctaatctttctactggcacctcatacggtcaactccctaccgtaggcattgtcaaaaagagaaaactaaatcacgaagactttccagatctaggcggtgatgcgatggatggtctcgacgatgatgttgcggccatgctgagacaagatacggcaaattgtgcttga

SEQ ID NO: 322 - DNA, 954 bp, Golovinomyces orontii
  source 1..954: mol_type = genomic DNA
atggcatcatcaaaatatgccagatctccaactatcaaacgtatccttcgtgaagctgctgagcttgctcagtcaccttctcctgaatttcatgccgcccctgtaaatgattctgatatctttgattggcatttcaccattcgaggaccgccttcatccgcatatgcaaatgggatctatcatggccgtataattttaccacctacttatccacttcgcccgccatcttttcgcttcttaaaccccagtggccgatttgaagtaaatagagagatatgtcttagtataagtggccaccatgaagaaacctggatgccagcatggggtgtacgaactgctctagtggctctaagaagtttcatggaaacggatcctaaaggccagcttggtggaatggaatgcactaatatcgagagagaaaatttcgcgagagaaagtatcggctggatttgtaatgtgtgtaaaaagaaaaacaaagatatcttattggagtctcaagatacacatcgagaaatcggcttaggtacgaatacgtgtgaatctcaagaagtttccacaactatctcgaaaatttatccaagtgaattagtatggaaggatgaagaagaggaaaaagttatgaaaacaagtgagactaaaacactagaaacatatgaaaaaacaaaagatatactcactgatattccgcttatctcaacgcgtcctctcacttatcctgaatcgtcaagaaattcttcgaccatgtcacaaactccaaacagcttcccatcaataaatttaaattcaagacttactcaagctcatcaacaaatacctggtagaccattgaatgaggagccaccattatggattgacagagcaattgcaactatcgttatttgcttagtggccatggtaatgaaagttttactcggactgggtcgagagatatcttgggaaacaagacaagagtga

SEQ ID NO: 323 - DNA, 1050 bp, Golovinomyces orontii
  source 1..1050: mol_type = genomic DNA
atgtcatttccaacgaaaccgcaaattcaactcctcggatcaaatgggcctattcatgccatcacttattcgtcgtccccttcaacctacatcttgacaggttcctccgatcgaactatccggctgtataacccatcgcgcgtcgatgagacgtcggccatatccagtgtccgcgtcgatgagaaatcacgatacaaatctgcacaactaatacagagttatacggcacatggttatgaagtactttcaatatcaattgcgccggataataatacctttgcatctgctggtggcgatcgaacactttttctgtgggatgtagcaacggctactacaacgcgacgattcagtggtaatcatggtcattctgcacgtatcaataccgtgtcttttgccggagaagcagcaagtctattagtcagtggtagttttgatgccaccgttcggatttgggatgtgaagagtcgaaatattaaacctgtcatggtcttcaatgaggcaactgatagcgtgagctgtgtcattgcaagtgacggagatatatgggctagcagtgtggatggaaaagtccgacgatatgatatcagaatggggagaatgattgtcgatctcatcggagtacccgtgacgtgtcttcgagcgacgaaagatcaaagaggtctactcttaagcggactcgatagtaaaataagattgatggacatagatacgggtacgcttctcagaagttatcgtgctgatggttggaaaaatgaagagtttcgaatgtggagctgctttggcgggagagagagatgggtactctgcggtaatgaaaaggttgaaggatctgatggggaagtagtcgtctgggatacactgagtggaaatttagtagaaagaattaaagttgaaggatccaaagtcgaaggtaagaagaagataggaagagatggaaaagataaagagcggagaaatgtcataagctgcattgtatggaaagaagacggcaagggagatcaatggtgttgtggcggaaccgatggcattgtaactgtctttggatcatag

SEQ ID NO: 324 - DNA, 1113 bp, Golovinomyces orontii
  source 1..1113: mol_type = genomic DNA
atgccttgggactcagagctagctcaacaacagcaaattagcaaattaggttaccaggaagcactgtctttagccagagaagtacaatctagcctgacgactgaacctaagtctgtatatttgacagacccatttcttcggccgtttttagattcctccttcgatcccccaaattatttcaacagcaacctaccttcccttcacggatttaaggctccttcctcgggaaaaaatagcgttcctctcactgaactagctccacttgctcagaccgttgtctcacaattgagcgcgaatacagccagactaaacacagttctaacacaacttacagatgagattcttcggagtggaagtagattggcgtatgaagttgagcttctacggggaaacacattgaatctatcagaggctttgacagaggtgctccatgatgatttggcaagatttatacctatagatcttgacaatgactttaaaaaaaaagtagaagagcaaaagacgccaaccggactccctgataaactttctggtacaatttttaatacaaagtctgatctttcaactattcaagagccaccattcgtacaacaacttcgggtattgactttagtacgatcgcggctagaaagtgtaattaaggttttcgatgatgctatggcatggagcttccctccctctgaggtctcgaccgcttcgtccttcttttcagtttccggacctgaaattggatcaggaatccacgggtatagtacggaagataaaggacaaaagatctcgaaaaaaatacgcagtgaaatatcagaagcactgaatcatgaagatccgatacatggtattgaatctgctaccaaaagagtggaggaactcgagagcctagccatcgtttggaaaggtacatcagaagaaagggcaagacttaaatttattgaaagcctggcgaagatggtgaaagaacgacatagagatcttatgcgggactcagaacaaattttacgtcctcgccagtcacctaagaaggcactagaagctattgattcaacagaagagagtaaacctataacaggttatggattcataagccaacttcaaaaattaagaggccctctatag

SEQ ID NO: 325 - DNA, 1470 bp, Golovinomyces orontii
  source 1..1470: mol_type = genomic DNA
atgccactcactattctcacggaatatcaggtgaaataccttctgaacaacctcagcaagaccgaagtccacacgttgcaagactcaatgcgatttgctcttcatgaatatgcaacaggagcttcaagttcacaaatatctaccgatgatcagcccaatagaaccatagtctcgacgagaaatggtaaaacgacgctattcatgccagcggtaacaactggaagtattggaatgaaagttatcacactcaattcaccttctccctacacaggatcttcagcaaataaatcgaatgctcaaccagttgcatcacccgagggcgcacttactcttatgacggctgaaggcaagccatttgctttcattaattctagagaaatcactgctttcgtaaaagttctcacatgctttggttgtgggagacaagcatactggcatgttcgattaaccctccttttgcgcggcagcaccatcaaaaaggtgcactttattaaccgtgacttttcggatcgctctgccgcactaatgaaagaattcttagactttgacccagaagttaggaaacgcgagggttggcccgatacgagctttgacttgacttcgctgaggtttggcgacattgaaaaaacgttgaaagtgttagttcgcgcagctgatgttatattttgcgctacaccatccacagtgcctctctttgatccggctatcctgacaaacaatgaaggtcgcaagcgagcgcgtttaatcattgctataggaagctataacccaaatatgattgaattaccaccagagataatcgatcaagccatcagaccacaagctgcaaatcatatcttccaccgaagggctgaagaaggtggtgcaataattgtggacacattatcatgccttaaagatgctggtgagttggttgaagctaacgtccgagctgatcggaccgtggaattgggcgagctcgtaatgctcgaatacatggagaacgagcaggtactggtcgacgattacgatgatgatgttttgcagccacaagcctcgaacgaaagcatccctggtcccagtcaaaatgtttctcggggagtctttcgtagggacagcgtagatagttgtagcagtggtccggcattatcgaaacttccgtctcggaaatcctcaatgaacctgcacaaaccaccatcaagtaagcaaataagcaatcgatctcgaaggtcatctgagaacagtaacgtgagaggccgcaagtcatcaataagtgaggttctaaaccaacgcaaacgtaactccagtatcttgtcgctgcgatcaaaaaagacgcagaatgacttggagaataagcttagtcgatggctgagcggcggaaacgtaatatataagtctgttggaattggtctcatggatcttgtttccgggatcaatatagtacgattagccatagaaaaaggaattggaactacagtgagcgacttttag

SEQ ID NO: 326 - DNA, 1893 bp, Golovinomyces orontii
  source 1..1893: mol_type = genomic DNA
atgtggccacacaactcatttggaatcaatggtccgtatccaaatggcttcaatcaggacgaatatatttttcaggcggatatggagtccttcaaccaatcagcgttcgatgtaaattcgcaagttgccaatccaatcgtgcaatgcgctcctcggccactgtctactgtacagaccaacacttcgaactcccgcccttctgctccacagataagttccagagcagcagaactcaaagcgcaactacttgcccgtcgagcaaactcatcgaactctcctagcagcaagcctgtctcaaagacagacacaagtgtcaacgtaaatggcacgaggcaagaaaagcccgaaaccacaaactcagcatgccagtcgcccaatcagcagcagcttaacctaaatgatctcatttcgcaatattctgcatcgaaatctaaaacagaaaaaaagaaagataaagaaaatggtaatatcaattctggaaaacccaaaaccccgggtaccactcatccaaaagactccggtgagtcacaaactccaagcaacaaaaacattcccggtgtgaataaagctgcattcatcccgaagaagaaaagcaatatcaaactaaatagcaaagaccatggtcgcaaggttgagaccaaagtatctgaccctgagacttctgaaggtgaaataattgaaggagaatcctccaagcttccaaatactaaaaatttccatgaaatagatgtaagcaaaaatttcttgaaagatggcgataaatcctctcgcgtactctctcgagaccagacgacaagcctgcctcaagaacccagccctcacgagaaatctgctgtgcatcatctaggaactcaaaagcaagggccaaagtatcctgtgccggttggccccaaagccgataatagatcgaaacatattccggacaggcatggtcaatcgcgacgtgaagctaatattgaggtgactcataactcagaggtccgcgctcaacccagtagagcagaatctaaccgacaaaaacctcctcctttacgtgagcaggaactgcgagctgtcaacccaccaactcttgaggatcttcttcctcatgatgttgatgttagagaatggttagaaataacttgttaccataataaaccttacagagataagatcttaggtcgacgaagagctatcgcagcgcttgatgcccagagggagaaattaatagctgaaattgaagcagaagaacgggggccattttcttcatcaatgcttcccccgccaattcctaattacaaatcgggtgatagaattggtaccatatctattgcaaaaacatcttcccctgttccacatgaacgcaatcaaatatcttctaacaaaagatcatactcctcttctcaagattcttggcaggaaaatggtcctgggaaaattgctcgcactgataacatgaattatagccctcagaataaagaggagcaatcttttgacagtcgacgacccaggtcaagtgaccgcgaaacttccaaccgtcaagtgccagaccgtcaggacgactattcacgtccttgtgttaacaacaatcgagattctaaaacttcgccaagctctgcggttttcgagcgtaaatctccagctcgcatcggtggatatgaaaatgatccatatgatgaggaggatatatcagaaactggtaatcgattctttgaattacagggaaatcataggggacgagctatagacacgaagaatcgcggtcgaggaagggctaggggccgaagtgatgttcgtgattctcgtgatagtccagagctaaggggtgagggaccttccagctttaagagtaccagtggcaggcctaacaagaattttcggggtgcgagtagaggttcccgtggaaatcattag

SEQ ID NO: 327 - DNA, 1065 bp, Golovinomyces orontii
  source 1..1065: mol_type = genomic DNA
atggggtctgactcgattgatagccctttgcagtgcagaataaaattactcactagcccaggtctcgaaagagttttgagctgcgaaggattagagagcataatagggatcctcatcgcccatatttttcactttctatctgtaattatacttttctatctaacagcgaccattttcacagaagaaggcctacaatttgcattcattagcgcatgtttacaaattatatcgccagctggaatatttctctcagcaccgtatgctgagagctcttgtgcattttttagttttgctggttgtcttatctttacaaaatctttctacgctaaaggagacttgagaagagactttctgatattaatatcaggggtttttttcggagtcaccactacctttcgcagtaatggaatcttgaatgggtgtctctttcttgaggaagcagttagaactctttgggatctcaagaaaaattttcagataacaacgctacggcatttactggccacaactactgctggcttattcgtagcctgtggctcatcattaccacaatatattgcttataatgaatactgtagagtggatctccctctcagaagggagtggtgtatgagagctttcccaagcatctacaaatttgttcagaaccattactgggacgtagggctgttcagatactggaaattctccaacatacctctctttgttatatcagcacctatgtatattctgatatttatttctggagtcaaggcgataaatcctgcccaagataaagtttccagatcatatgacgacaagcgggacgtcaaagtcaaagatgtaaatatttggattcggcgaaatttggcaatctctcaattgttactagcctttggaactcttatttttgctcatgttcaaattatagtcaggatttcatcatcatgccaaacttggatatggtttgtggccaatttattacggaatcaaaggaatttattccataaatggtcaattagatatatggtcacttactgcatagttcaggctggactatttagttcgttcttacctccagcttga

SEQ ID NO: 328 - DNA, 1452 bp, Golovinomyces orontii
  source 1..1452: mol_type = genomic DNA
atgtttttaaactacggtgctggccttcatggtcatgaattttctggcccttcattcaactacaaagacaatcaaactttgagaacaagtccgtcaacaaaatccggtgggcttaaatcatcaagaccgttgtcaggacattctgttcgttttcaagaaccaacacatgattctgactctgatatggcgagtgaagggggtggatctttggtgaactcggattgtgataaatctcgaagagaccagactttaatacggcgtaaagacccacgaaagtcaatttttcaccttgcacatcccgctccaactctgacgcagactcagaaacttctaaaaatccgcccaaagatattacttcaattacaactcctatcatcgcaaagccgtccaaagccttctattgatgttctaccttcatctgttctcgcccctagaatagcaaggaaattccctcgacttttaaggggtaagggagaactggggagcaatgatgtcattgttgtgaggagtgaagattatgataacaactctgattacagtgctgaagatagtgatacagacgaagataatctcgcgaaccgcgatttaattgcagtaatttgtcaaatgccaaggactaagggaacttcacttggagttgctgagatagttttcagtgacgggtctacatgtatagctacacccttacctggtggtagatatgagataagatttagggaggaagaagggtgcgagattactgctcattggtggattaaaagatatccaaaagcggaagaatttaagttgctaggatacgcagataatcttgaaatatttgaatcttatacaacgttatcatcatcttgtggacgatatcctccaacttcatcaatccgagattataaattcgttcctgatcgtaagacttacaaaatagatcaaaaaatgaagacattgattcaaatcaccggtatttgggtctctctgcgtcaaaactggtccccttgcttcaggtacaacgatgcacttgcaatcgctagctcatcgaaacctacccaacgcgaaactgggcgcagaagatctgttgtatactcaccagctactccaaactctacacaaaataataccaaatcattaactttgggaaattcaattcgtcgagtttctgtgagagctagatcaattaacggagattcaggtcgctctgaaacccaaaaacgaccagaacgcacactctcagcaggaaaagcattcgtgcaacgagctgcagcacatcgagctacagcctctgcaactagcaaaaaacagcttagcacttcaaacccatcatcaactccatcctttggaccatcttttcctggctcgccaatgacatctatagataaaacagtaaggacacacagtcgtgctcagtcatcccattacccgccgctgtctgtccatgatgactccaaatataagaaaatctga

SEQ ID NO: 329 - DNA, 2037 bp, Golovinomyces orontii
  source 1..2037: mol_type = genomic DNA
atggctctcgacatacctaattttgctagcacacagcttcatcttcttgaacatgaacttgccatggagcttcaagagattagtaatgaagtttcaaacaatacccccaagtcgctctcgcgagctggacttgcaatcatgaacctcacacctgtgtcgcaacgtacggggcttggagctactggaaatgagggtgaaatccctgcaaatggtatgcgtgttggtgatatagttgctttagcagagcaacccgttggtatcgctcgtaaatctgaggtgcgagatctggagcagaaaggggtgaaagggatcttggtaaaaataacaaagacacgactggccttagcacttgaagatgatagaggagacaaagtagaggcgcttttatctggacaacagaaacgattatggattataaaactagctgatgaagtgactcacaagcgtatgaaaatcgtcatggagcgattaagtcgtatgcccgagagagattattcaaatctagtgagggtcctttttggcctagattctctttctccagcacatcatttcgatgatgatcttgactgggtcgacaaaaaactaaacgatggccagaaagatgcagtcagatttgccttgggcagtccaactgttgcgctgattcatggaccacctggtactggcaagactcatacactcattgaacttattcttcaaatgctcaaacggcaaaaacgagtgcttgtttgtggtccctcaaatatatccgtggataacattgttgaaagactggttccgcacaagatccctcttgttcgtctcggacacccagctcgcttgttgccttcggtactaaataactctttagatgtactcacgcaatcttcagaagatgctgagattgttagagatgtacgtaaagagattgattgtaagcaggcttcaattcgtaagacaaagagtggcaaagagcggaagcaaatttacgccgacataaaagagttgagaaaggaatatatccaaagagaaaagaaggtagtgaaaaatttgtttcgaggttgcaaagtggtacttgcaacccttcatggtgctggtagttataatatgagagacgaattattcgatgcagtcatcattgacgaggctagtcaagcacttgaagcacagtgttgggtaccacttattggtgcgcagaaagtgattctcgcgggcgatcatttacagttaccacctacaatcaagttgttgaattcaaaatcaaaatcaagcggcaccactactaccgatagacaacttgaaatcatgaaaggagtatctttaggactacagctacatggatctaaaattaaacggatgctaactactcaatatcgaatgaatgaaaaaataatgcgatttccatccgatgagctgtatgaatccaaattagttgctgctgctgcggtcaaaggacatacactcgcaagtcttccatatgaggttcgagagacagaagacacaatcgaaccattgatctattttgatacccaaggaggtgactttccagaaagaaatgaggaagaaaatacatttgaaaataactccaaaaatcaaaacaacgacaggccaagtaaaagagtgctaacaggcgaaagtaaaagtaatgaaatggaagcagctctggtcaaatttcacattcagaatctggtcgacgctggtgttaaacctgaagatattaccgtcattacaccctataatgctcaggctagtctctcattaatgacccgaactttcaaggagacttttcctggcattgaactgggaagtgtggatggatttcaaggaagagagaaggaagcgattattcttagcttggttcgaagcaactctaagcgtgaattgggattcctgagtgataaacgaagactcaatgttgccataactcggcccagacgttctttaactgttattggagattcagagacactaaggaatgaccaattttttggtcgatggatagattttctagaagaacatgcgtgtttacgctatccatctatttcgatgttactgtaa

SEQ ID NO: 330 - DNA, 1356 bp, Golovinomyces orontii
  source 1..1356: mol_type = genomic DNA
atgggaacaaggacttcgctcctcattacaccctctcattttgcggtggtatactttattgcagataaaattctgaaacttctggaaagctcttctcaaattcgagcgacagtattaactaccttaccgaatttagtccaggcgtattttgcttccttgggagacttctacacctgggagctttcgaagaaaatttttggtaaaagaagtaatacagcatgggtagcgcttatgatgtcagtgctgagtccatggcagtggttcttctctaccaggacattctccaatagcttggaaatgtctctgacgattatcgcattaaacttctggccatgggaatttacgtcgaatccagaaccacatcaaattataagtgacatcatagatacgagtgtgatgctagacgctaacagacttagaatttgtctatttctcgccggaacagcatgtatccttcgtccaacgaatctattaatctggttctctctcacatcccccagaaatccccgcctatttctatgtaaaatctggccttatgtgtttgtctcttctgctgatactatctgctatctccgatcgactatattatcatactggatcttcccgccctataaatggcttcacttcaatattgctcaggatctcgctatcttttatggtgccaataaatggcatttctacttcacccaaggtcttcctcaactcttggtcacctacctccccttcactcttattggaatatataatgcattagtgatgcccccaaatgatattagatttattctcacagctacagttatggtcacagtaggatcattgatagcgatttatatcacaacagttcatcaatctggcgtcatttctattctacctcatattcgtaagaattatgaagctagctatctcaccgatgacggcacctccctcctaccaaaccttattaacaataaaactacaccttacgttgcttttctcatgccatgtcacagtacaccataccgtagcgctcttatacatccaaatctaaaagcctgggcgctcacttgttcaccaccattgcatattccaccatatacagtagagcgattaaactaccgcgatgaagcagatcgattctatgacaatccggttgaatttctccaacgagaagttggcaggaaaggacgggagtggccgcttttcgttgttggattcgagggtatcgaggatgtgctccatcaagtgtgggagtctgtggatgagaaatgtggtaacaaactaaaggaaagaaaaagaattttcaattcgcattggcacgatgatccaaggcgaaaaggagatgtcattttttgggagttagttcgttgttcagattga

SEQ ID NO: 331 - DNA, 1584 bp, Golovinomyces orontii
  source 1..1584: mol_type = genomic DNA
atggtaacgattgaagacttagaggaagccttcgccaataatccttccttgatcgcctctcttcaggactttgagcaaacagaaagcaatattggtcccttttccagtgcacgaaacatgcgctcccctctgtcaaccaactcgggtcggaatttagatattcgttcggatggagaatcagaaccagcagaatctgctagtgggggtctatacagtccgccagcatggcgtcgcgatagttacgggaatcgcagtagctgcttttggaagtcacctccggtgttattaaggcgattgcggcgtcaaagtttagaaagtagtcctgacttcgacttcacaaactttgatgaagatgaaacactagcgccagagaagagacgtagtccaagtcccgacgtattttgcgggaccgagggcgattttcgcaagacgtgtgtcgaactgccaaagcagtcaagaagccatgaagattcaagagacatggaaaaatgggaaaataagaataactacatccgattttcggtccgagccgaagtgcaacataagactgaaccattcgaagcgtggttatcatggatcaaggccaaatttgagcgtataacaaaatcgtggctttccttatttacctctatcatcatcatcttgatttcattactgattgtcagaaccctgaatgggatacggcagattggcgatttacaagcaacaggcattgctgtttgggatcttggagagagtctacggatatcgaacatgacatcagcacctatcatcgtcaaagaattagatgatctaagtgacagtctcaagaaattagccattgagctcagcagatttttcgctaatgttgatggtgatattgatggaatcttgattgtcatggactgggcacgccgcgaactctgtcagttaaatagcataccacctccttcttctcttacgactgtctttggaaatatgaatacgttactgagacgctggggcgttctcgaaacttcagctgggacgccgactcagctcgggacattgattatttttatcttcggtcccagtattcaacagcgtaccgaagcaactctacagaagacgttccaagagttcctttccgtcttagaagatgccataaatactgagttaacccatagtcttgccctcttctctctcttttcagccatcgatcaccgatttctaaatctagttcggactgtcacccgtgaagttaatacccaagagagcgccctggaggaagaactttcgaagctctggacaagaatccgtgggccaaattctagcatggttcataagttcgagaagaataaaaatcttctggggaatatccgatctatgacacttcagaacaaaactaacttggaaaacttgcgccggaaattagtctcgcccttactccgtggtaatatcagtactatcggtctcatggaacaaatcaatggcctagaaagtgtttcaggctaccttggaagcgttcgagagaagcagagagtcaagttaatggagattttgtatggatctggccgtcatttcagtgtgagtcaaactcatcttgctgctgaaaatctaaattaa

SEQ ID NO: 332 - DNA, 1113 bp, Golovinomyces orontii
  source 1..1113: mol_type = genomic DNA
atgaggtttaaaactgcaatcagaaatatccagaaattttctaaattgaccgcttccctatcataccttggcaaggtagcatggattcgtctagatgatgattcggtgcgcttaaccgtgattccagaaatcgggactcaagtatgggcgtcactatccattgactcaatttttgaggattacaccattcagtcagcagcgtccaataatactatcaaccttgaacttcctctccagcctcttaatcgtgctctcaaatctgctattcatgcatcatcggcctcaatccgcttgactaaaaaagatggtgtacctgtcttatctttgactattgtcacctatatggttaacagtggtaatgctgcaaatggcttcttgaacgaagcaagcaaggataatctcggagatactatgtttgaagaagaaagcttagatgctgctttttcacgagatcgagaaacagttgtgacgcaagatattcctattcgtgtactgactgccgagagtgttgaaggaatccatgaacccagagtccgtgagcctgaagcacatataatgcttccctctctccttcaattaaaggctatctcggatcgcttcacgaagctggcgttagcaacaagtggtgggactttcaaagtcgcaaactctttgaccaggggtcccaggcttgagttggctgctaacatgcacggaagccttaaattgagtataactaccgatgcactcaaaatttcaagcgtttggactggcctaatcaatccagttttggaccccaggcaagtagaagatggagaaggcagccttgaggatcaccccagcacgaaattgagagacgctggcccggatgcttggtcaacagttagaattgatggcagagattggggacgagtactcagcgtcggaagactaggtggacgagttatcgcttgttttgcagatgagcatgcattgattctctatgtctatctttctatctatgatgaaagtgatgaatcagttttgacaaattttatttctctttggcctgatgataaaatcaagatttttttgaatacttcgtgcaaggagagctgtcttttcacggttatctattcacttctatgtgattaa

SEQ ID NO: 333 - DNA, 2157 bp, Golovinomyces orontii
  source 1..2157: mol_type = genomic DNA
atgtctacagatacttcgcgattatcattcgccaaggtggcagcatccacagggaaagacaacaattcatcgtttgctaggatcgctacatcaactccccgagacacacgaaaggaggacacttctacacagcaaaatcctggtacgccgaatggatcattaaacaacaaaaataactctaaggaagacgaacagcaggcttttgttaggtctggaatcaatgacagtcacgcaaaaattttagatgcagtaaaggctcttaatgtcacaccatctctacctaagctagctgtaaatggttcaaattttaaaatcaaagcaaagacagcaagtggattttcagaaattttcaatcaagttgattctgactcaaaatcggttgcgaaatttcctagtctagacgacaagagtactgtatcagagagtgtaagcgtaaaagctgtagaagatgatgatatattttctggacgagaatctgttattgcaggatcaaggattggctcagagtctgctgctctcgtctaccgtgctcagttttgcgaagtttccgagcgtcaaaataatacactacttcaagaggacacgattaaagccacgggtaacctacccgatatatcagaaggcttcaacttattctatcgtcaaacgcccgatgagaagttgttagaagcattagactcggtgaaagaccgaatatttttgttaagattagagcaagaggtcatagagtttgttcggtcttcaaaggagccattcattgatttgcctccgtgcaattcattctgcagaatgataactcataaactagcagattactatcatctaacacatcaagtagatgctgttgcaggtgcggttcgcatattccgtacaccgttctgcagattacctccatctctgacgagtctttcaaatcccctaaattccgctaatacacctcctcctgcaacaatgaaaattatgcgcagaggcggcgatactggcccgagtcattcgaaagctgtatctgagtctggaagtgatgagaaggaaaaaggtctctcagcaaaagaaaaactttcacgggaagaaagagaagctgcctacaacaaagctagagaacgtatatttggtaaagaagaaaagagtagagatccaactccagaaatagaagatgggaatgagatatctcgatcgagctccttatcgaccagagatcggacaggacaaagcaagagatctaagcctatcaaacagcgtcgtgatgactctgaaaactttgattccagatctcaatacgcgccattttttccacagcaacaaggtccaacgtggataccttctacaagatattctcctatcgcccatcaatcattcataggaaataatcgtctttttcaaaaccccttatccccacaatacgcagcacctcctcagcaattcaacccagtactaactcatgctggaaatatgcagtctttcagtatgacacagcctcattcgacgcaaaaaacacaacggtatcagtcaaacgatgcacaaaattccacatatggatcgcctattcagtccccttctatattacaccaacaatggtcgcaacccattccatctagcccctatcagcaaccagtaccgacagtcagagcacccccaatctcaatcccatatgcatttggacaactaccaagcacagttaatccagccgacccaaagagccaacatccaatacctggtagtttcaatcgtcacgcgtttaaccccaaaacacagtcgtttgttccaggtggtattggagttccgatgttacagcaagttactcaccatgtgactccttatcttgataattctcatcacaatccctctccttcatctttcaatgcttttaattcagctcaccatcaactcagtaatggaatgagctacagcatggctcgacagaattcaaagaacccgcttccgtcatatcatgtatccccacttatggcacatcgtcaaatgatgcatcagacggtacagctaaatccatcacaagggatgttacatggaatgctacctggaatgcctcagaatcatacacaaggtatcagtatcgcgcacagtattcaaatgggaaaccatctaccaaataatggaaacccatcaaccctaccccccaaacctccttcaggtatttga

SEQ ID NO: 334 - DNA, 711 bp, Golovinomyces orontii
  source 1..711: mol_type = genomic DNA
atgaaaaggtacatcaaggagccacaattgggaggggtatcgaaggcttctgcttctactctctgtcaaaaatgtttaaagaaaggtcattacagctatgaatgcaaagcatctgcacaagaaaggccttatgtttctcgtccttccagaactcaacaattattaaatccaaaacttgatctgttacgaaagttccgctctccctcactctcctctgtttcggtatcaactatctctacgcactcatctagttcatcagatgtacaagcgagaaagttattggtctctgaaaaaaatagagataattctcgtatgaacaagaaccctagttatcccagaaataaattaatgcgcggggaaaatctacaatcacaaaggcgtgattttccaccctctaataggaaaagagatcgacagtcttcttcaagttcagcttcatacagctctgactatgaccatagttcaagtcagaagtcaactagaagaagatatcgtagtgttagccctccgattcgaggcagaactactaagggtaagagtccgtattcactgcagaagcataatcgctctgaagtcgtggaaacaaaggttacacttagagacattggtgttcccaaagaaaacgagagaacatctcctgtaagagagatgagccttagccctttcagtaaacgtctggccctgacgcaagcaatgaatatgaatcgttaa

SEQ ID NO: 335 - DNA, 837 bp, Golovinomyces orontii
  source 1..837: mol_type = genomic DNA
atgcagacggggtctttgatctttttcatcttgggtagtacctatttaagattttaccgctcggaaaaactaacgtctcacagacacatgcgtcaacttgaacaggccaaaaaagcatttccagatgtctatttaatggtaggtgtcacaggcgacaaagaaacacacaaacgtaaaggccttactgtgctctctggtcgggaacgagcagaaactgtgcgtcattgccgatgggtagatgaagttattgaggattgtccttggattgtcactcccgagttcgttgaggaaaatcagattgattatgtggcacacgatgatctcccatatcttgcagacgaaggcgacgatatctacaaaccaatcaaggaggcaggtaaatttctcgtcacccagcgaacagagggagtaagtactactggaatcatcactaagatagttcgtgattatgaaaagtatatagcgcgccaattcaagcgtgggacctctcgccaggaactcaatcttgagctcaagcgccacgcatgcgagatgagagatgccatacggtctaattggtctactacaggacaagaacttggaaaagaattgcgacagttctggcaagctagccggcctggaagtcctgctagagtcacgagctttgaagcatctcttaagagtggtcctctcacaagcccttctgcctcatctcttctcaatcgtcgccttgataatcacaaagcagaaagtgtgggatccgggagtgactttgccactgggtatacccttgggttaattggaggcgttcgatcatgggtatgcaaagaagctaagaaacacatgaaaattttctga

SEQ ID NO: 336 - DNA, 1071 bp, Golovinomyces orontii
  source 1..1071: mol_type = genomic DNA
atgcccacagctacagcctctggtactgaccacaaaagtagcggctctgctaggtctcgcgaccataaccagggaaaccaagatcgtaaatacacagctgaacagaaagctgaagtactcagagtaagacggtgctctcccactgcattttacgacatactagggttagaaaaagtcaaaaaaactgcaacagaggcagagataagaaaggcataccggcggataagtctcttaactcatcctgataaaaatggttatgaacatgccgatgaagcattcaaaatagttagtagggcattcggtatattgtcagacaaggagaaaagagctttacatgatcgatctggtggtgatccggacagccggttcagagggcagcaaacttcaagtcccttttctggatttgccggaaggacatcaggagatggacatagatcaggggcgtatcaggaagaactcacacccgaggagatgtttagaagattcttcgggggaggtgctatgggaggcttcggaggctttgataatagcccaggttttgtcttcaatatgggaggcgggccaggaataagagttcagccatttggaggggtaacacctaggagaaggccacgaaatgcgaatgcacaacaagagcaggaagcctctatacggcaaacaataatgagctttctacctttaattataattttagtactaccgattttttcatcgctgatatccggtttcacctcttccccgcctggaccaacaatgcggttcgataggcccgttcaaccacataccctacaccgtcgtactggtgttttaaacataaactactacattaatcctgatgatgttaaaaccttcactccatcgaaatggaattccttggataaacaagcagagattagctatgtgaatcaattgaatttggattgccaaaaagaaatacaaactaaagaggatatcattaatcaagcccagggttggttctctacagacccaggaaaaatgcttgaagctagaaatttaccaatgacagcgtgtaaaagattagaatcattcggtttgcgacgtatatcttag

SEQ ID NO: 337 - DNA, 942 bp, Golovinomyces orontii
  source 1..942: mol_type = genomic DNA
atgacacttaggcaaaaatgtctgatggcttctcttatcactcagcatgagttcgcaaatgccttaagtaggtatccttcaattcttaaaaagataagcaaaaaggctggtgcacaatcgctagaagagcttgatgagtttaggtatcgaacggctatcgcaaatttcaacaaaagtatgagacgtactatggaaatttctgatgtcattaaactagtcgaatggaaaatgcaccatggtacttttcgtccgtcgttaagaaagctggttagctccaactcaaatgacacgcttactgctgcgacaaagagtgcatttgactactactctgagaataaaaatgatatcgcgggtactctggaaaaactcacaaagccattaaagggaattgggccagccacgagctccttgcttctatctattcatgatcctgaaaatattgttttcttcagtgacgaactttaccgatggctctgcgttgacgggcgtaaagtctcactgagatatactgttaaagaatttgaaaaactttatgaaaaatctaaaaatttcatgagtagaattaagtgcaccccaattgaactcgagaaagttgcatatgtcattatcgttgaacaggatctatctcaaaagcaaaagctactcaataacccacaaaattctcctggcggacttaccagtccaattagaaatgaggagaaatctctatctcagagagcaaatcgctcaagaagtcttcgaaagagagaactgagtgaagaggctcaaaatgagagcactggacttgaatctattgtcaaggtgagaaccgaagaggtacaacggcaacaggaacttgtgactagagattttagcccagacagagattcttcaaatactttaactcagaggaagagaaaagcatctgacagctttaagtgtagcaaaaagaaaggaaaatag

SEQ ID NO: 338 - DNA, 1737 bp, Golovinomyces orontii
  source 1..1737: mol_type = genomic DNA
atgttaacagggcgaatcaatatgtcacgtggatccagaaactcggctttacattctcgaggaatcactcgaggagctcgactagacaaagatggtgacctagtgatggatccttgtattagtggttctaaaattagcgcgaatgaaaataaaacccgctctgggagaggtcttaatgaattacaaggctctagcaggtcaacaggatctgcacgctggaagggatcgaatagagcttcaaagtctggtacgcgtagatctcaacaagcaataattcgtggaattagagcacaacaagtgactgagtttgagactctggaggtagtcgggctcggcacaagtaaagcatcttcagatcctgacggtggtatggagagtctaattggatttctggaacgcaaggcaggtggtcttgattccaggctaaataaagcggtcaaaatcaaaaagtcatcgcgggtgggtgattcagtttttataacagccagcaaacaagacgtcgcacaaattctgaaattggacaaatttcaattcgccggagttgcattatctatcaagccgtgtgatccacttcgagaatttctcgcaaccagatacaatgttgagctcaaactacttgatttatcaagacttggaaccgatcccaaattgcaaggtatgggattattcaaagaaggtgtcaggactgcggggaaactattcccggcaatcatggcaatttgtgatgggctcttcaagacccgcaaagacaagcaagatgccatcacaagcattgctcttaccgataactcgctttctaccataaatcatatctcatctcttttggaaatacttcttctaaaaaataaccccatcgagtcccagatcctcaacttaaagaccgaattgatgaaacgctatcctagactacacacaattaatgatattcgtgtgagaagtccagaagaaatcgctgcgattgtcagtgcagctgaaaatgccaagacccctatacctgtcgcaggaccgttttttcgagacgttgaccaagttggagaggcttttatcaggcactttataccactgtatgacagtgatagagccgcccttgccgttggtgcttacgatgcagaatctacattctctctttcaatcaatatgttatcacctcgtggctcagacatcaatttaccgaacccaagttggactgattatgtaaaatattctagaaatcttgataaggtcactcatcttcctgcacgaatgaaccgtcaattcacaggtactcaaagtatacaggcagtctgggccagtttacctcagaccaaacatcctgatattgatctagaaaatgataagtatctcttcgaaggccatgaacttccctgtgtcccagatccaactggtcaaagtccaatgggagtcacgggtatgattattaacatgcacggtgaatttaaagaaccccttaattccaattcagaaaccatttctctccgcagcttttcgcgtacatttattttggggcctggcctcccggtggtccaagaaaccatacccgcgcaaaatgacgtacactcggtggaacaacagcaagagataattgcacggcaattcatggagcatactggaatgacattgcaatactgtcttctctgtctccaacaggctgaatgggatgcacagcgagctaatgagatgtttaatcagacaaaggcaaacttacctcctgatgcctttataaatgccggagcataa

SEQ ID NO: 339 - DNA, 2184 bp, Golovinomyces orontii
  source 1..2184: mol_type = genomic DNA
atgtctgaatctacgtccaggaaatcgttaaatgttaccaaaacttccggaaagtcaattgaagatatcaataacaactctacatttccccttcaaattttatctccatctgtcggtattcctcaaacgcttgaatttcgtgaattatcagtaaatttacaagtcaaagatttaaaggccttaattcgagactctcttgtctgccggccgagcgaaaatttgcagcggttaattcatcgtggacgcatgctaacaagagagaccgaaaccatgttggagatatttggcgatgaagtgctaagtagtccagtagtccaagtcattcatctagtcctgcctcctgcattcaaaggcaccgataatgcttgtaccaacgataagaaagcgacgagtgaaccagcgccacaaaacctaacatatgacttacaagcacggcagcgagcacagatacacacaccaaacatccccaaagaaaatcaaagtcaaggcagtcaagcccatcagcaatttcctggccctcaggatcaacaacaaattgtcttgggtgagctagaagagcttcaaaatctcatgggacagaggcttatccaactacaacgtgaaacccaacgattgaatcaagagataaatagtatgggtgctcaagccttgcttcgaacaaagtctattcaatctcatccaaaccaatatatagtccaaaattcatctaactctctaagccaactacctatgttaccgtcagatctttctaacatgcggtcgaactcgtcaaatatgaactattcgtcagaaataaatctggatcctcgaattaacgatagggttgacactgtagccatatgtgagcaagaaaatgtagatgtgcaacagtctgatcagatagttcatatcaggcaaggttcggccacaagtgccggagactggcaagtaccagtaaatgagattaattcgagcgcctcgaatcattccgtgcaaaacgagaaccaaaattccgattatcttagaaactcttacagcgatcatcattctatgttacgaaatgcggacagatcgagcttcaaaaatcaaccaacaaaccaaaatcattccacttcaatctctgaaaaagtaatatcgcgagtctactcatctcttcccaaatcaaattcatccactagcttagctgttgcactaacgcctataaatccaaatttcaatccttctatgggagaaaactctggaacaaatgatgtctcgccaagctcacaaatagtgaacaaacccatggtttatatcctttcatcaccaactggtccaagagctattcttatgagtaatgctcataaattttttacgcctccccgaaatgctggctcatttcgttattcgtttgatgttagtttaattagtaggaattcactcgctatgccggatcgtaatcagcctatccgccagcaggtccatgacctaaggaacacaaatgtgcaaacagaaaacacaggaccagctccacctcaagctaacatgcgagctggaggtgttggtttgcaagtcggacagattttatggcttattatccgattagtggtactttttttgctctttacagcagggaactccagttggactcgttggcttatggctagtggaattgcttttattgtccttattgctttcacgggattcctaaacggggtggtccaacaagtatggattccgatccgaagacatcttgaagcgctggttccactcggcccagttcataatcagaatgttcctttacaacctaatggagttaacggccaagccagagatgaagatccagctgtccaaatgcgtttaccagaagatataaatataaatggaaacgagcctaatcctctaaattacccaggtagaggtattgatcaacaaataaggtcgagtagtgagttactgatgacacagattcgacgcctagaacaatcattaatacttttcgtcgcaagtctggttcctggggtgagcgaaagacatatcgcacaccgggaagccctagcgaatagagaagctgaacgtcagcaacagctttttgaagccacagcgcagcgagctaccagagcagccagaaaatatagaaataaaaggacaaatgcgcaaagtcaaatcgatagccccttgaatcaagatgacgcacctcaggcagaacctttggttcagttgtaa

SEQ ID NO: 340 - DNA, 972 bp, Golovinomyces orontii
  source 1..972: mol_type = genomic DNA
atgcggcgacctcgagttcaaccaagatccagcgtttcagcggtatatcttgcgcgcgttcccaaatacatatgggatgcttggcaaggtcttgatgatgactccgaaattcaggttggcactatccgacaatgttacaagaagggacctaaaggagaaccgaagaaaagatatcctcaacatcagaatgtccctaaagagtacaatctcgaagttaccgagaagcaggtcaagaacactttcatcttcacggaacaggatcttccaggattcaagtcaagaacacagactaaattcgatccaaaaagcgccaatatgccggccagattagttcagtcgaagagcgataagtttactccgaaaggagtgtttgacccgaacaaaagatttcagccgtattttaggaaagctgtcccaaaacgaacaacaatgagtggcagggttgcctatgaggttaactgtatagctgttcataacgaggaagcagaacgactattagccttgagaacgattgaagccatgaaacccaagagacatacaacattcctcaaccaagatatttcagtcactggaaagggctttattcagccgggctcaatcagtgctcaaaattcgttctctggtttcattaaaactaagggagtagcaactggtgcgcgcccacaacttcaaaagacagctcggatgccacaaaacgagcttctggacctacaattatggtctatgaaggcctttcgcgctgagctacaacaacccgaggcttaccttagagagaccctcgaaaaggtggcagtcctagccaagagcggaaagtttgctacactctggtctctaaaatcagagaacaaaattaatatgtacgaagatagtatagcacctacaatagaaggtgatctgggagtggaagatagtgaactggacgatgaaaatggggaggatgatgtcgatgtcaaatttgaggatgtagcataa

SEQ ID NO: 341 - DNA, 1083 bp, Golovinomyces orontii
  source 1..1083: mol_type = genomic DNA
atggttgctaaaagcaagcccaaaacggcccttgcggcacagaagggtatcgatttcaagaaactaaagattaagaaaagagaaaaggctacaaaaaaagctgtatctttaacagacggcaattctcaatcttctaatgcagcaagtcagatacaaaatgaagactcgaaaattgaggaaagagtcactgagaaaatcgatagttttcaaggtgagcttgctggtatagacgaaagcgatagcgattcctccattgatgaaaccaacatggacaacaataatgaagatgaggacatacctgtatctgatcttgaggacattgatgaggaagagaaagaagatctgattccacatcagcgacttacgatatacaattctaactcactaagcgctgcattgaaacgtatcgcgcttccaatatcaaaaataccattcttcgagcatcagtcagtaatcacatctgaaccagtagtcatttccgatatctctgacgatttaaatcgcgaattagcattttatgcacaaggtctgtcagcggcacaacaaggtcgaaagaaattaaaagaagagaatgtcctgttcactcgcccgacagattatttcgctgaaatggtcaagccagacgagcacatggcaaagattaaggctaaattgatcgatgaagccgctagtaagaaagccagtgctgaggcaagaaaacaacgagatttaaaaaagtttggcaagcaagtacaagttgccaaattacaagaacgggataaggagcgaaaacagactctggagaagataaaggttttaaaaagaaaacgacaaggtactgacacggtaaatgaaaaagaggccgacatgtttgacgtagctgttgatgaagagattggagcttccaaacaatcacgagatcatcgtgacgggtctaatcggcgtcagaaaaaagatgaaaaatttggatttggtggaaagaaaaagttcaaaaaaagtggtgatgcattaagtagtggtgatctaagaggattctcaagcaagaagatgaaaggaggagtaaaatttcgtccagggaaatctagaaggtcaagtaaaaagtaa

SEQ ID NO: 342 - DNA, 1779 bp, Golovinomyces orontii
  source 1..1779: mol_type = genomic DNA
atgctgtcactacacagacagctaggacggccctctctgctgaagtctaagagggctttaaaatctgttgcatcttctcttcgaaatggtgaacctagattaaataaggtttcggcgacgattactcagccaaaatcccaaggggcttctcaggcgatgttattcgcgaccggtatgaactctgagggtttaaacaaagcccaagttggtatctcatcagtatggtattctggaaatccttgcaacatgcatcttcttgatctcagcaaacgagtgaaaaccggtgtggagcaggcaggcctcgtgggttaccagtttaatactattggggtctctgacgggatttctatgggtacgaagggaatgcgttatagtttacaatctagagatcttatagcagatagtattgaaacggtcatggggggtcaatggtacgacgccaatatatctattcctggatgtgacaaaaacatgccgggagtgataatggccatgggacgtgtcaatcgtccatccctaatggtctatgggggttcaatcaaacctggatgttctaaaactcagggtaaagctgacatcgatatcgtttccgcctttcaggcttatggcgaatacattacgggcaagatcactgaagaagtacgctcagatataatacaaaatgcgtgccctggagaaggagcctgcggtggaatgtatacagcaaatactatggcaacagcaatagaggtcatgggaatgacgctacctggatcatcttccaatcctgctgcatcacagatcaagtatcaggaatgtctcgcagctggtggtgcgataaagaaattacttgtagaagacatacgaccacgtgatataatgacgcgatctgcttttgagaatgctatgattcttgttaacataactggcggctcgacaaatgctgtactacaccttattgcaatggctgattcagtaggcgtaaaattaaccattgaagattttcaagcagtgtcaaataggatacctttcttagctgatttgaagccttctggtcaatttgttatgcatgaccttcataaaattggcggaactccctcactcctgaaatttcttcttaaggaaggtataattgatggctcaggtataacggtgacgggaaaaaccctagctgaaaatgtcaaagtataccctgattttccaagtgatcagacgattatccgaccgctctccaacccaataaagaagacagggcatattcaaatcttacgaggatcactagcccctggtggttgtgtaggtaaaattaccggaaaagaaggaatacgtttcactggaaaggcaaagtgctatgacgccgaagatgacttcattactgcgctagaaaggggtgagattaaaaaagatgagaaaaccgtcgttgttatccgatacgaaggtccaaaaggaggaccaggaatgccggaaatgttaaagccatcatccgcaatcatgggagctggactcggaaaagatgttgccctgattactgatggtagattttccggtggctctcacggatttttaattggacatattgtacctgaagcacaagaaggaggacccatagggcttgtacgagacggagatgtaattgtgatagatgccgaaacaagagagttgaatctggaagtcgaaggtgaatttgctcccaaacctcctaaatataccaagggtacgctagcaaaatattcaagagttgtatccaacgccagtcgtggctgcataacagatggagaactggaaccgaattcatcgtaa

SEQ ID NO: 343 - DNA, 1497 bp, Golovinomyces orontii
  source 1..1497: mol_type = genomic DNA
atgttgggattatctagcctagacagaaaggctatggagcaatctcgtcttgcaagacttgctcaaaaacgcaaagatcaaaccattgacgagaatgatccaaaaagaaaaaggagattcgatactccccgccaagagatattcgatcgccgaataagaaataacgttattaaaggtcctgcagattcatcatgtcgtcaatttcagatgattttaacgaaggaaggggtaccatccggagttcagtttccgaacggagtcgtgaaaaagacttccatacgaggattccctcgtaatggggatgacatatccattgaagaggtcttgcaaaagaatgacctaactctggctgtattaggagcttttcagatcgacccagaatggatcatggggaagcttgaaccacagacacgggtctattgggtacttcaagctaagactgaaattgaaaaaagaaatatcgagtcgcaagcatcttctaataacaagttctgctttccctcaatgaagggtagagtcaaatgcatgcattctaagcttcaattgttagcccatccaagccacctccgcatcgtggtgcccactgcaaatttaacatcatatgattggggtgagactggtgtcatggaaaatatgtgttttattatcgatctacctcggcacgaaaatggaaaaagttcagcctgggaagatcttacacactttggccaggaactaagctacttcctagaggctcagggcttaccagagcaggtcatcaaaagtatcctaaattttgacttttcccgaactgctaagattgggtttgttcattcaatcggtggaactcatacaggtgattcctggaagcgaactgggtactgtgggttagcatcaacagtgcaaaaacttggtatacaaaataaagatcctattaaaattgaatttgttaccgcgtcccttggaaacttaactgcaaaatttatcaagtcactatatctggcagcacagggaagtatagctgaattaacgccaaaaaaattctgccgagtttattttccgactcgtgaaacagtagtgaaatccataggtggagtcagggccgctgggaccatttgttttaattcaagatggtggacgtcaaaccacttccttcaacacattatccgggattgccatagccggagggagggagtgctaatgcacagtaagatatggtttgtaagaccgcacgaaccctcccttaaccgtcagtcttgggcatatgttggaagcgccaatctgtcggaatctgcatggggccaactagtaacggacatggaaacgagacaacccaagctccactgcgcgaattgggaatgcggtgttctctttcccgtattacctgaatgtggacagacgtccaaacgcgcgaatgaggagatggcagaatttgtaggctccgtgcctatcccgatggtgataccaggagccgcctacgcaggcagagagccttggtttttcaatgatagaagatga

SEQ ID NO: 344 - DNA, 1260 bp, Golovinomyces orontii
  source 1..1260: mol_type = genomic DNA
atggaagaaataggcttcgtactttccatttctatgtctcaaatcctttcggagtattttgtttctggatttacagtcatccttcccaaaataagtcaagacctaaaaattcctcctgaatcttcactttttattaatttttggtcgagtatcagatatttatggtggctatctgtctatgttgctggctgcacctggctagctatttggagtcttattggcggtttctctaaccatgaaataatgttgaatatcttcatggtacttggaagcatatatcgcccaggtcctcgaaaaaatatggtttttagtatctatggtgcttgtgcaccggttggattctatcttggaattattttcgcaggaatcgcagctgaattatcatcttggggctggtttttctgggtcggggccattttttcagcagtaacggctatcacatcaatcgttactatcccgtctgatatcgaaataaaaaaatggccaaagataaaatcgaaatggattggcttggctcaatacttattgttggaggcctcatctatttcattcgctattctcgattcatctcatgctgcagatgggtggaaaacatcgtacatctactctacatttattatcggatctttgcttctactattagcagtctacgtcgaagctcgagtagcctcacagccattattgccagcttctctatttaaggtaccgtgtatgtctgctctttttctcgccttacttttgacatttggatccttcggtatatttcttttttatgctacattctatatgagcaatataatgggtgcttctccattccaggtaatcgcttggtacgcaccaatggctatgggtggttgtatcgtggcaacatttgggggactaatcctacacttattaccaggtactattctaataactatatctggtatttcttggatcatcaccccacttctctttgcaattgcaccccaaggtgcaagctactgggcaaatgtattcccgtccatgatttgcgcacccattgggatggatgttacattcaatgtagccaacatctttattacaacatccctaccgaggagtcagcaaggactggcaggtgctataatatcactgcttgtccatcttggtatagcgattatgcttggttttgcagacataataaattcctattcagtggctcgtcttggccttagacagagctaccatgctgttttttggtttgaagttgcttgtgcagctacggcgctcacatcctaa

SEQ ID NO: 345 - DNA, 921 bp, Golovinomyces orontii
  source 1..921: mol_type = genomic DNA
atgtttcaattaggagttgaaaaaaatgctacagagaatgacgttgctgaagcagagctcgataaggagatatcatcccttaaacaacaagtatttaaaatttcagtctcacgcctaagagctcgccggtcaattcaggcttctactatactatcctttcctagcacgctttcaacattgaatagccttcgtgagcatgaagagctattagctagtccaggggatttcgattcccttatatctaacctaaaaaaacaaatttcacacaatcaaacgaatctatatcgactgtgcgcggctgtcacttcttttataatcaaagattcagatcctaatgctgtaaataaaggtcaaatcctcgcgttacgctttgatgtaagtagtagaggcagtttcatcaggccttactacgtaatgttcaacaagccgtgggaagaagaatcgagatcagttttgaacgttcatcgtcacacactaccgcctgcaatcccactcatgagtctagttcaaaggtatctccctggcaataaagacacgtctcttgtgggagctccagctacaagaataccactccgacaatcactacttcatttttctcgcgctctacgacgctttatcgtggcatatcataatcgtctatcaatactaaacggcttacgcacccgttacatgctcgatagtcatgagatcaggaatgaaattgatacgagaaagtttttactggatatttcagcggtagatgctgaaataaaacagatacatcttgaatgggtagacacacgcattggaagacttgtcattgatgaggatggaaaagtaaaaaagtgtgtcgtacttgatgatggtgtaagggatagagtggctgagaaagggcatttacactcaattgtagattttatttttatgagagttctaagctag

SEQ ID NO: 346 - DNA, 1518 bp, Golovinomyces orontii; identical to SEQ ID NO: 180
  source 1..1518: mol_type = genomic DNA

SEQ ID NO: 347 - DNA, 1911 bp, Golovinomyces orontii
  source 1..1911: mol_type = genomic DNA
atgactttagcagattctcaaaacggcatagaggtcatctcaggggatggtacagatgttctcaaaagtagatacaataaagtgcgtaattggatcaagacgattaacgaaaccgaaggagggcttcaagaattcagcagaggaagtgagaaattcggattcaatgttgatgaaagtaacaacgcaatcacgtacagagagtgggcgcctaatgccactcaagcttttcttatcggggatttcaatgaatggaacccagtatctcatcccatgacaaggaatacatatggagtctttgaaatcatattacctgctatagaaggccagcccgtcattcctcataatactaaggttaagatatccctaataacacccgacggtcaacgtatcgatagaatccctgcctggattcaatatgtaactcaagacctctctgtctcaccgttatacgatgcacgattctggaatccccccgccgctgataaatatgaaatcaaaaatccaagaccaaaaaagccagagagccttcggatatatgaagctcatgtgggaatctcttctccagagctcagggtaaccacatacaaagaattcacaaaaaatatgcttcataggattaaaaacctgaaatataatgccattcaattaatggcggttatggaacacgcttactatgccagttttggatatcaaatacaagatctgaagaacttaatagatacagcacacgagcttggaattgttcatgcatccagtaatgtcctagatggtcttaataagtttgatggctcggaaagttgctactttcacgcagggccgaagggtaggcatgagctttgggatagcagattgtttaattatggcagtcatgaggtattgaggtttttactcagtaacttacgtttctggatggataagtataatttcgacggatttcgttttgatggtgttactagcatgttataccatcatcatgggataggaacaggattttcaggtggctaccacgagtacttcggtcctagtgtcgatgatgatagtgttgtctatctgacacttgctaacgaaatgttacatcagctgtatcctgacgttatcactattgcagaagatgtctcaggaatgccagcgctctgtcttccgttttcactcggggaatcggatttgattacagacttgcgatggccatcccagacattgggacattggcaacattgctttaacctaacaaaccgccgttacagagaaaagacgatcgcatactgtgaaagtcatgatcaagcgctggtcggcgataaatcaatcatgatgcatctctgtgatgcagaattatacactcacatgtccatcctcactgaattgactcctgttattgaacgcggcttagcgctgcataagatgatacgtttacttacccatggtctgggcggggaagggtacctcaactttgaaggcaatgaattcggtcatcccgagtggctcgactttccgcgtgagggtaatgaaaacagtttctggtatgctcgtcgtcagttgaatctcaccgaagatcctctccttagatacagatttctcaatgatttcgatagccaaatgaattcacttgaagaaaagtatggttggctacactccgatcaggcctacatcagctcgaagtcaaaccagattttagtatttgaacgtgccgggcttgttggttactcagatcataaagttggcgtcgaacaagctggaacttaccgtgttgttctaaccacagattcccaagaatttggtggatttggacgaattaatcacgatacacaacattatactacaccaagtccatgggataatcggaaaaactatatgcaaatatacactcctgcagatcggcaatcgtatgtcctggcacttgagtctactctgtga

SEQ ID NO: 348 - DNA, 1449 bp, Golovinomyces orontii
  source 1..1449: mol_type = genomic DNA
atgagaactcttgtcggcagattcatgcataagaacaatgcaccaaatttatgcgttctcttcggatcacataagagggaactttatgaacaagatttaaatcagtggtaccagcagacaaattactcttcatggtcacgagaacaactcatctcacgattaagacaacttgaacagtcacaagtgtcctcatcaaagaacacctccaaaatttcaatttcgaatccaagtctcagaagaaaaactcttccagcaagagcttttgatccaacaaaatacagcacgcgactcgtggcttttaaattagcatatttgggtaagcgttacaacggatttgagtttcatgcaaattgctatacgccactgcctacgatagaggaggaattgtggaaggcattctggaaagcaaaattgattttcccgaaaaatggacaagctgttggtgactgggagggatgtgaatatagcaaatgtgggagaacggatagaggagtaagtgcctttggtcaagtaattgggcttagggtgagaagcaatcgacctctaggaagaaagaggtcaggggtggagcacctaacacctcaggttgaaaagatagagagcacaattgaaaaacaaaaactgatgtcgacgatcttaaatcgtctgctcccaccagatattcgtattttggcatggtgcccagaacccccgcctgatttctctgctcgtttctcatgtcgcgagcggcaatatcgttatttcttcacgcagccctatattgatgcaatgagaactgctgctaaactttatgaaggtcaacatgatttccgaaatctatgcaaggtcgatgcaagcaagcaattggagaacttcgtgcgacgtattaattatgcaaatatcgaggaggtcactgattcaataccttcattggaatttctaaacgccccagaattccaatcatctgattgtgcgaagaattctgagtatcccaaagtatactcttttacgcttcacgggtcggcatttctatggcaccaagttcgccacatggtagcgatcctatttctagttggtcaagggctagaaaagccatccatcgtaaccgaattattggatatatctcgaaatcctggtcggccgatgtatcaaatggcagcggaaaccccactacacgaggacgaatctgaaaaaaaagagatgctgcaatggatctatgtaggtgatacgccgggtactgcagatacaaagtatggggtacctgctggtggcttgatggataatctttggcagaattggagagaacgaaagattgatgagatactcgcagcgagcttgttgggactagttgcaggtcaaggtcacattgccaaaaacctcaaagccaggtcgaatggcaagggaaaaagtcaaaaagtttttgacggaaggaattcgcccatactgcaaggcacttatacaccggtttaa

SEQ ID NO: 349 - DNA, 1200 bp, Golovinomyces orontii
  source 1..1200: mol_type = genomic DNA
atgagtttcttcattttgattttactggcgcctgctgctctacttctggcccatcccaacgtattcagcatctatgatgaccttttagcgtttcctcaatacgaaatcgttttctctgaatcttttatatctgataatcaggcctcgtttctcatctcgcaaagatcctcggatcctctagtttctgatctctcaaaatatactagtggatcaccgcatcaagacattgaaaatgaaaacccttcagcccgtcctctgagtacttcacgtgaaacctacgagcttctccatctccaaggtgtaccacatctctgtagtatccctattattgggctatcttcttctaataagacaactgaacgtgatactcgcgcagcagaacagcatgggaatattgcaaggattagaaggaagctgtctatactatgtttctggtggtggagctatagcttctgcttcaactctgaggtcactcaatttcatcacttaactttacagccgggaaagcaagagccacctaaacgtgatccaaccactaagcaatttattttggggaaagctatttccaccaaggatagtcggcctcagtccaggagacagaccaatggattgatggatatgtatggggggaagcagactccaaaacttgaattgcaatacaaaggtggaacaagatatcttgtacaaaagatggatagcgggactatatgtgatctcactaataaaccacggagaattgagattcaattttattgtaatccatcgttgaccgatcgtatcgggtatatcaaagaagtgactacatgctcgtacatgatgatagtctacacttcacggttatgcagcgaattggaattccttccgaccatagaaaataaaaatcacaatatcacctgtcgaatggttgttcctgagcaagatctctctgataaaaatgagcttaaaattttagagccatggatcaactctgaaagtcagcgcatggcaatacctgaaatttttggagatgacaagagtaaagctaaaagtggtcatagcgatgcggcctcagaagaagaagaagaaaagacggatctacaacctgaaatggttgatgcactgcgctttgagcttcagaagatggcaaaggagagaggatggaaaattgaaatagttaaagcccaggagaaacaagggaagtctcagccagcgttgatgtag

SEQ ID NO: 350 - DNA, 1140 bp, Golovinomyces orontii
  source 1..1140: mol_type = genomic DNA
atggatattttacagcatctggcacgctttcttgaccggcctctctttccttggaaaaacctcattgttggattttcaattactcaatatctttttgaggttctacagaaggaagtctcccaggaagcttatggccgtgcaaaatccaagtttggtcttgttagcggccttcttggtcagattcaaaacacggcatttatttactatgatatactacctaagctttggacgttgactggctcatggctggtccgattatttccaactcgattctctggagagatatctcactcgatcgtctttaaatttggcttcaacaagcaaactttaaagctttttattaccgatatgctcaaaggtcagatgctcgcttttattctgactccaccaatacttgccggatttttatctattgtacaaaaaactggtatttatgataacaatttacccaataactattctccattatttaataaacttatgccacttgagcctggagaactcaagactaatgtcgagggattggctcgaagattgaataaaagaagtgcgcacagcaatgcttacttttttggcatgccatggaaaaaacacatagttatctacgacacccttatcgagaaaagcagtactgaagaagttgttgctgttcttgctcatgagcttggccactggagcttaggtcatacaaccaagttatttgggatttcccaggcccactttttctacatatttgctcttttctctgtcttcgtcaataaccattcactctatcagtccttcggctttagaaacgaatatcctataattatcggctttattctattttctgatgctcttgcccctatggatacctttataaaacttcttatgaacattctttctcgacgttatgaatttcaagctgataacttcgccaaagaattggggtattccgcagaccttgctcgctccttgatcaagcttcaaatacagaatctaagcactatggatgctgattggatctatgcaagctatcacttttcccatcctatattaactgagagacttagtgctataggatggtatggtgacaaaaacatcggaaatgagaaaaaagatgacgaaaaggttacactggccagtagtcgagaactctaa

SEQ ID NO: 351 - DNA, 1593 bp, Golovinomyces orontii
  source 1..1593: mol_type = genomic DNA
atgaatgttcgaataagcttgaaaagagcctgttttaaaaggaaaagttttaatgctactgcgtttttctcaagtacttgttgtaatctcgaagctgtagaaaaagcctattacgtaactactcctatattttatgtcaatgatgctcctcatatcggccatcttcattcaatggttgtggcggatattcttaaaagatggcaaattcttagaggaagacaagcgtttctttgtactggtactgacgagcatggcatgaaagtccaacatgccgctaaggtagcaaagaaaactcctaaagattattgtgactctatggccaagacgtacacacgactggctgagcgagcaaatatttcaaatgatcattttgtcaggacaactgatctttctcacaaggatgctgtacaacatttctggactgtattgagagataagaatctcatatatgaatctaaacatgaaggttggtactgtatcagtgatgagacgttctatccggaagggaagatagaaaaacgtctagatccattcactggaagagcatttatggcatcacaggaaactgaaaggaaaaattatcattttaaactttctgaatttagagaaccattgcttaaattctatgaagagaacccagaatttgtccttccaagggaacgaatggatgaagtcgtgagttctgtcaggtctggactagaagatctatcaatttccaggccagccgaaagatcaaatcaaacagtatacgtttggcttgacgccctaataaattacatttccaaagccaagtatccttggcccccaggacagcaatccatggccggatggccagccgatgtacatgttatcggtaaagacattgttagatttcattgtatatattggccagccttccttcttgcagctggtataaagcccccaaagcagatattatctcatgctcattggactctggggagaaagaagatgtccaaatctaccggaaatgtcgtaaatccattttttgctatagataggtttggagtagacaccattcgatattatcttgctcttgatgggggaatattaaatgattcagactatggaaacatatatattgtatcgagatacaaaagggccttcaggaaaagaaggaactctaaggattcatatgcagagactgaaaacttaaggattcttctgaaaatgctacctgacacagtaagcttgcacatggaacaattggacgtgggaaaggccttgaactgcatcatgaaagccgttcatcaaacaaatacatatttccaagacacgacgccttggaatctaacaaaatcttttgtcactttaaagcaacttgagaaccgtagcgactcagtcaaaccattggcggaaatcatataccattgtgcggagtcacttcgcatagttgggattctactgcaacccttcatgcctggaaagtcagctgatttacttgacatgctatgtgtcgacccgaacaaacgatcatttgctttcgcaaagctgggagctgattttgactttggtaataaggtgacatcacaaaaagatcaaatgttatttccgatgttgcctgttgaaaactag

SEQ ID NO: 352 - DNA, 2736 bp, Golovinomyces orontii
  source 1..2736: mol_type = genomic DNA
atgccgggctatcaacgctctccagcttcaggaggaacgagcgatcaatcaatcatcatctctctcaaggcaacgcgattgattaagagcaagccagttcttccactagaactcatctcaagaattgttgatctacttccactttcagatctcatgaaatttgcccgaacatcgaaaaaaattcttcaaatagtgtatgaggacgctagatgggtacgtcgccttgaggtcatgggcgtttggaatgaggatgaagtaaggagaaagcaagaagagaatctaagatcgagagagtcgtgtctgagggagagagatgagggagaaaaggaagatgaagaagaaacagctgcaagaagaatgggaattagtgttaatagttatggaatatcagatcttatgagaacaaatcaaaccttgtttgacgcagaaattgaggagaaacaacaaagattagactcaaacacatatactccaattccgtggtcatacaagattcaacctctcgcacaattaaatcaatcgtcattaatagaattgccgatttccgggttaaatctcgacctagatgcacaattgaacgtactctctagagttaaatctcttcggggctttgggcgacatgaatttgcgaaaatatatgcagttcttgcaccattattttatgaattgatgagatccaaaaatgattccaagctagccatcttcctaactttcccagatcccgaacaacaggcacaaatgttagctcaacttcaaaaattctctaaaagtgattgggcttccggttgtaagcaacgggaagcgaggcttctgagtgtgattcatacatttgagaatggcgcatttcaagaatttgaacatggatatattgaaggagacattgatgggagaatgcatagatatgcacatgtattgactttgctcaatagcggccaaatagctataaatcattttgttcaaaaacactcaatgtttaccgatcaaaaagttcttggcgaccccatggaatgctttaatcaagtctgtacagacggcattctactaacgttaaataaacaatctgagataatagatcgtgttttccctgtcggaattgatgtcctccaaattttactggaaaaatttgttcatgaacatcttgcgaagtatattactctgctcttggacaaagtgtatgaaaaaagtctggcttcttatgcaaagacagtgccaattttacttgagcagagcatacggtttggtctctcgctacagccatcgagaaattctagccagaactttaatgaagaagtcaaagcaactttaactaaagtgtttgaacctctagctaatctctattttcaagcggaattggaatgcttcaaaaagaaagcagagattgaagtagaggagtgggaagataagcttagtgctcaagacgcaactacagagtccttcttaatggcaaacttcaacagacagtctgataaaagggattttctatcttcgtttaaaaaagttgtcatgaagcctatccacgtattgcctttggtatctactctcacgactaagccgatgtcagcccagcaatttccaaagaagaccaaccttcaagtccccatttactcaacctcccccagccctcagacatctggtatagattgccccaactcacctgtctcaccaaattttgcagcgcccaatgatgaacttacagccaaagcagcgctgatggcatctcggctagagggtatccgttctctcgtctctattgaagtagctcttaaccttatacacgccgccaaagcaagcatcgaacgtgtgtctctatttattttaatctctgatgaaattggtaaaaaagttcgcaagcagtgctcaagcatctatgtatctctacttcaaattctcggtcaacgtcatatcaaatctggatttgacaaagccgtcgatcacctctcccgatataatcctcgagaagttattgatcatcggcaaggtgtggcatctcttgtaactttcttagaattggtaaacgtaggtgacttaattagtcaaatgctagaagttttctttgagcagcagttatgtacaaacaaattaatagaccgaaatgattgctttgatccagcagcaaaggccaaaaaaagttttgaacaaattcttgatgagcgcgtggccgctggtctgaacaaggggatttacgttctaatggttgaagttgaatatctctttgccacggtccagcttccaactgactataatcctactccaacggcacataaaaattctgaggtaggatcatcaaaagccgctgaacttgtcgtgaacctcgttgaaaatcatacaaaaatgctagtggggagtacagataaaaatgtgctcgatgtctttaatcaagaagtcggtctacgtctttttaccattctctgtcgacatttgaagcgacaaagaatctccgtcagtggttcgatgacattgatctctgatatgaacctctattacctctatatacgaacgctaaaaaattcggaactacttgaatacttcaaggctctcaagtctttgagtcaaatctaccttattgcccccgaacatgcgaaagaaatcgctgatttcatcgctgatacgcgtcgttttggagggttatttcgggccgaggagatctatgagtttatcgaacgacgtgcagattggtattcggtgaaaaaaaatgtcgagaaagccatgtatggtattggatgtagggttatgtaa

SEQ ID NO: 353 - DNA, 786 bp, Golovinomyces orontii
  source 1..786: mol_type = genomic DNA
atgaacagacatggtttacgcattgagtcccagcccttccagtttggatctcgtttgttgaaagacgaagctgaagtctttcaattcaacgcatgggaccatcaaagagagaatcccgtatcagaatttgacaaaaacaggttcaactccgatcccgcgagatggaagtggcttcaacaagaattccctatactttctagcattactttacctgatgccggtccaaaagttcttcttgaagttggtgccggcgccggaaatactgcatttcctgtcctggccactaaccaaaatactgatctcaaaattcatgcatgtgatttctctaagaatgctgtagatcaatcattacccccgggcctgaacgaacaaagcgtcgatatcgctatgttaatttttactttctctgccttgtccccagatcagtggaaacaagccgtgcacaatatattcagagttttgaaaccaggcggcgaagttctattccgtgattacgcacggggagatctcacacaagtgcgattcaaaaatggacgttacttagatgagaacttctatatccgtggagatggtacccgggtgtacttctttgaacgggatgaattagctagaatatggacgagatcatgtaactcgcttggaaagatgaagagattgacaaaatcatcttccttcaaggtcataaatgtcggaatcgatcgacgattacttgtaaatagagccaagcatctgaaaatgtatcgctgttggattcaggcttcatttcggaagcccttggacccttaa

SEQ ID NO: 354 - DNA, 867 bp, Golovinomyces orontii
  source 1..867: mol_type = genomic DNA
atgtatcattcttccaccgtacatattccaccttctcttgcactgcaaatttcacgacaggctcccaactttctggatttcttgatttcgaacgaatcgtcggatttatggtttacttatgaaggtcttattcttacttgtctacggacaggtgatgaaaagtcagcacacacaagtcttcaaagacttatcgataggtttggcgcagataatgagagagtgatggccttagccggactgtacaaagaagctgtgagtcgggatgacggtgagctgtacagtatactagaagaatacaattctattttactccgaaatcctacgaatatgccagtattcaagcgacgaattacacttctcacgtctctcgggagatcagcagatgccatttcgtctcttattaagttccttgactcatcacctaatgacactgaagcctgggccgaattatcagatctttatgtgacgcaaggaatgtatccgcaagctatattcgcgcttgaagagcttctattggtaactccttatgcatggaatgcaagttacacgcgccacattcatgcgcgtcttggcgaagtactgtatatttcaggctctcttgcgaaaatcgggatggaaaagcttatgatagattctctccaacgtttctgcagaagcattgagctttgtgacaattatctccgaggatattatgggctaaaaataaaattgaaaaatttgaacgaagtagccgttactaagctttctgaaatcattcgccgaagcgcacgcaacgaattgggctggcaagggtatgaaatgacagagctcattgcagccaaggaggttctcgatcacaggtctgtcagccaatcaataactcgctaa

SEQ ID NO: 355 - DNA, 2922 bp, Golovinomyces orontii
  source 1..2922: mol_type = genomic DNA
atgtacgtagttacattcgtatctgcagcccctatgaagtctctctatgacctgatcgaaggtctacgcaatcataaaggaaatgaaaaggagtatatccaaaacaacttgaaagaatgtcgggcagagattaaagggcaagataaggacctcaaagccacggcattattaaagctcatatatcttgagatgttcggatatgacatgtcatgggctgctttccatgtactagaggttatgtcatctgcaaactacctccagaaaagagttggatatctcggtgcagttcaaagttttagaactgatactgaagtcttgatgttggcaacaaatctgctaaagaaagatctgaccacgactgctgtgccaaccctttctcttccaatcgcggctctacctcacattgtaacatcatcacttgcgcttctgactcttcaggacctactcccgcgtataaatcattcggatcctgccatcagaaaaaagactattgtaactttgtatagactagccctggtatacccagaaactttgagaccagcatggccgaaaattaagagtagactgatggatgtgaatgaagatgccagtgttacagcttccattgtaaatgtcatttgtgagctgggatggagacggccgcaagacattctaccgcttgtaccacgattattcgaacttttggtagaaggtggaaacaattggatggcaataaagctgatcaaactttttgcttccttaacacaattagaaccgcgactagtacggaaacttctcccccatctaaccacgattataaaaacaactccagctatgtcacttctttatgaatgtataaatggaatcatacaaggtggaattttcgacagcgcggtggagagtaccggtggtgaggaaatagcggcactatgtgtttctaagctacgagggatgatcatgattgaaggcgatccaaacttgaaattcgttgcgttattggcttttaacaagatcgttgtcacacatccaatacttgtttctcagcaagaagatgttattatggattgtattgacagcactgatctgttaattcgactaagagctcttgatcttgttgtaagaatggtagatagtgataatcttatccctatcattactcgtctaatgagacagttaaaacaattgcgctcggttgacagtgaagcagccagtaatcaacttggacaaatcgaaacaaaagaagattctaatgtcgaatctccaaataaaaattgtcgccaggaagaaaatatagcagaagctcctcatatgccaaatgattataagctcagcgttatcaacagaatacttgatatgtgctcaaatgataactacgggaacttgattgacttccaatggtacatcaatattcttatacagattttccgagttatatctacgtctgcatcaataacactagaaggttctagaaaacccaaaggagattgctcgatttctaagatttcagagcgtatcggagatgagttaaggaacgtagctgttaaagtaaaagctgtccgtttacaagcaactagagaggcagagtcactgatgatttctacctgtaatgatgattcttcggcgaaaatggcgaatagtagattcttaggctcgatagcttgggttgtcggcgaattcgcctcaagcctggcaacgccagaaatatcgctcaatgctcttctacgcttgctagaaatatcaattgagcctggtccactcattacttatcttcatgctttaccaaaagttttttccttaatcgctggtgataaccaaacaaaatggacaccagaacgcaagacaatgatttcactgcttctaggtaggattatctatgttctcgaatctctcacgacacatccaaatctagaggtacaggagagatcagtggaatactcagaattgctaaaactgtcggcagaagcctcttctagtcatgatgcagattttcaacaagaggctccgttaatattgacaaaagctattccttctttatttttggggctagagctcaactcaatagctcctggcgcacaaaaaatcgttccaaaaccaagtggactagatctgaatcaggagatcaatgagaatctcaaatttttacttgatgatatcaatcttgtatcctgtgataattctagaaataattcattcgacggctactattataattcaaccgcatcgttctcagttttgtctggggctgcagcgagcaattatttttctgatgaagagcaacttcaaccagaccagttagacgacgagaaatttcgtcaagatcctgaaattattgaaaaaagacgtgcagaaaggacagagaaaaataaagatgatcctttttacatagtcccgatcaatgtaaaatcaggcttttcagcaactcttgatagtttaaatacaggtagtaaatccgattttaacgttaatgaaatcccaatattagatttaaatcttgataaactggccttctcagaacaggtcacgcctaagatttcaaatatcattaaacatcgaagacgggtagaagttgctgctgatgaaactattgtaacaagtgatatccagactacggatttagaagaaaacgagtcaaggcctgataaattacaaaatgttaagtcaaaaaagaattcatctttactacaagttgactcgagctatatcagcgcattttgtttggagaataatatttctgaagcttcagataacttcgggcaggatagagatgatgaaactgagattgcattagcaatgaatgaattagaaatgcaaagacttgagatgcaaagagctagtgaaagaatacaagcacctcagagcgtagaaagaactacagtcattaagaaaaaaagaaacttaaaaaaaatacgaaagtccccgaaaatattgatcaagggagagtaa

SEQ ID NO: 356 - DNA, 1311 bp, Golovinomyces orontii
  source 1..1311: mol_type = genomic DNA
atggttcgaaatattgtaattctcgggggaaattctcaccctcaacttgtgcaagaaatctcacataacctaggagtgcctccatgtcaacggatcttgtgtaaattctctgtgggagagagtcgcttggagatacaggactcagtgcgaggcaaagatgtctacatcattcagtctggaggtggcaaggttaatgatcatttcattgacctcttaactgttgtcctccccctttttccatattcacgacagccagatctaccttacaataaatcgggcgcacctctatcgcgaacatcaacagacactaatcaaaaagattttacattcgaaagtctacctcctacacccggcccaggccagccgcagtcgcagagtatcgtgaacgggaatgggaaaggaatagaaggtctaaaaactaaactaggaaaggcttccttagatcagcaaaaccagaatggagctacttacgtcaacggaatcacaccacgacgtggagtagaagctacagatcataaaaaaccaaacactggtcacactcatcagtcaacatggaactctcagaataatggccttcacttcactactcatgactacgagaaccctactatgatttcggaggctaagaatatatttcgggcgaaaccaggctataagcagtgggttgctcaggcaggtacattggtagctgatctcttaacatgcgctggtgcagatcatgttatcactttagatctgcacgaccctcagtatcagggattttttgatatacctgtcgataatttatatggaaaatcactattaaaaaagtacatacaggaaaaaatcccgggatatcaagatgccgttattgttagtcctgatgctggaggtgcaaagcgggctacttctatcgcggatgatcttaacatggaattcgcgttgatccacaaggaacgtcgacctactcgtatcactgagcggcaaaacgctaccatgatgctcgtaggagatgttaccaaccggatatcattacttatcgatgaccttgtagacacatccaacactatcactcgagccgccaaactcctgaaaagagagggagcagttcaagtttatgctttactcacacatggcgtgtttagcggtgatgcaatctctcgaatcaatgcctcggctttagataaggtcattgtaaccagcagcattccacaaagtgccaatcagcgaatttgtccaaaactagaagttttagagataggaccactttttgctgaagcaattagacgcacaaatcatggcgagtcgatcagttcgctattccgagattaa

SEQ ID NO: 357 - DNA, 3510 bp, Golovinomyces orontii
  source 1..3510: mol_type = genomic DNA
atgttttcgggccagaaccccaatattggggggcaaggtgctcgtttgaataacctaactaaccagcaatacaacagttttcaaccatcactacaacctcagcagaatgtttcgacacttggctacgggcaaaattccatgcaacagaacataaatggctatgcgcaaggtcagcctaattcctaccagccgcaacaaatacagatgcagcagacaggatttcagtctcatcaaatcccttctttcggcaacggacaagtcccccagcttcaggcctatcagaatggggcttcaaatgtatcccagatatctcaacaatttcagcctcaaagccagtttcaacaagtttctgaggcccctatgcttcaacctcagcctacaggatttgcggctatggcagatagctttaagccagcatcctccgctgtactagctagaggacggcggataccaaaaactcaaacaggtacaaagataccgaacataaggttgtcatttattactgcacaagatcaagcaaagtttgagatgctttttaagtcggctgctggaaatggacagactttatctggagaaaagtcaagggatttacttttacgatcaaaactcgatgggaatagcttgtcacaaatatggacattagcagatacaacgagatccggtcagttacatttccccgagtttgcactcgccatgtatctctgtaacttaaaacttgtcggcaaacagttgccttctactctccctgagaacataaagaatgaagtctctagtatggtcgatattatcaattttggagtggcagaagactcatcggaatctgcattcaggataaacacaaatgctccgatctcaactattctcaaaaaaatgcagcaagataatatccaggctggattccaacaacaacaacaaactggattccagcagccaattcagtctggattcgggcagattcagcaaggcttacaaccaaatccatctagtcctttgaataatctaggtgtcacagcagccagatattctggtgctctacccccaataccggcaatttcagcaatgccaactggatttgtttccaatcaagatactgcaccattaaacagtcagctaactggagctccgggccaatggggtcttgctaatactccggctaccggacttccaaacatagatcttcttcagtctcgtatgatgccacagcaaggccgggagctaggagcatttaccacttctggattacaaggaaacgcagttattccttgggctgtcacaaaagaggaaaagaagagatatgattctgtatttaaagcatgggatgggtttgggaaaggatttattggtggtgacatcgccattgaagtctttggtcaaagcggccttgagaaattagatttagaaaggatctggactttagctgaccatgggaacaagggccggcttaacatagatgaattttctgaatccgattttagaaaaaactccggagcaaatttactaccacaaaagacgggcgttagctatctgaaaaatgctacagtcttcaaaaataatgacgatgatattggatataaatccagtgctcgtcgtcgagttggaactagcagtacagcttcaaaaaatgcaactacttttaatgaagaaaattcgatagagcagctaaaaaagaaaattaatgagaagcaaatccgtcatatccaggaagatattgactcacataacaattctttttctcttgagactaatcctaggactgaacgccggatgttacagcgtcagcttcaggaacttacagataaattacctgagatagcctcacaagttcgcaaaacagagcaaaatattgctgatgcccggcttgaacttttccggttaaaagacacaaaagcgcatcctgaaggtatgtctacgattttgggaactggacctgggggcataatcaccgaatcagatagacttaaggctagagccaaagctatgatgcagcagcgctctgcagcattaaccgggaaaaaaattgataataagaatgagctcgctgcacaagaacgtttagaaaaagaatcctcaaagataagagatgaaaaagaagacaacgaacggatggttaaagatgtcgaggatagtgttcgtgaattttctcaaggtctatatgacagtctagttgagggagatcaagaaaatattatcctcacaaatacaatcctatgcactaatgccaattattcaacccctgaggatcgaactaaatatataaagcaacaagccgagcagagaatggctgagcgtttagctgcactaggtataagacggttagagagagagaaaaacgagagagctttaaagcttcgccaggcagaggaggaagatgctaacgagaagccgaacagaaagctagagaaaataagtatgatatcgatagcaataattccccctccaccaccctcaaggaaggtcacagctggtgacgctagtaaacgtaagtctgaagagcaaaaagtcactgaagagaaaaagaaaaaacataagtactttgtctcagcttttatgattgatctaatttttagggataatgttgcccttcaagaagaggaactggctaaagagcgagaagcttcagcatctcgactgaaagccttggaagaacaagtcaaggccggaaaagtaaagaaagaagaagaaaaaagaaggagaaaagcagcacaagttgaagcacgagagaaggagtatagattggccgcacaacgcgctgaaatcgaggcagcaaaggcccgcgagcgagagttacaaaaacaattggaatctatcgatgcagaagaaagctcctctgacgatgaagaacccgagaaacgagactgctgctctatctcggatcccgaagcgcctgtttcttctttctctagcccaaaaatacctgttacttctcccacatggattcaacccattccagaaaaggctcctgttgaatttgaaacaaaaaatccgttttttattaagagtgctcaggctagtactgaagaaatacctgtagtgcagtcaaataatccgttctttcgtcctcccaccaagagattactagtactcaaaaaccgtgtacggccagaagatgatgagtggtctgttgttgattctgatctagaaaatgactcttcagatgatgatggccctggagctggaaatgcccgtcagcttgcttcaattttgtttgggacaatggaccctccacgcccaatatcagctacaggtggagcaagttctccacctattactcccactaaggatacgatgacagaatcagtatcttctaagaaaaatttcgctcctggtgttcctccaccaccacctccaatgccaaatcttagtgctccttccccgcttaccgctggtaatgctgtaaaggcagaaagaccttcagggtttttgggtgaaatccagatgggtaaagcattgaagaaaacacaaactaaggataagagtggtgcttcggtctcaggacgagttctagactaa

SEQ ID NO: 358 - DNA, 1065 bp, Golovinomyces orontii
  source 1..1065: mol_type = genomic DNA
atgccagaggacgggagtggagtatctccacagaacaagagttcctgggcagcatttcttaaatctgttgcctctttcaatggagatttattttccatgacagcacctcctttcattttatcatccgcatctttgacagaattctcagcatattgggcggaacatccatcactttttgttgcacctgcggcagagcaagacccagcgaagcgatttctattagtggtgaaatggtttctgagtactttgaaacagcagtacgcgagtcgaagcgaaaaatttggtaatgagaagaagccgctgaatcctttcctgggagagctattcttaggagaatggagagatgaaagtggcgttacaactctcatttcagagcaagtatgccatcatcctcctgtaaccgcatatcgaatttcaaataaaaccatgggagcctcgttttctcgcactataaacgttcggcaaattggtcgtgctatattaactattccatcccttaacgacacttacttgatctcgctgccaagtttacacattgaggggctgttgtttggttgtccatttgtagagttaaatgatcagtcttacatcaccagtagctcaggatatacagcaagaattgactacagcgggaaaggatggctaggcggcaaaaaaaactcattctcgacagttatttatccatctggcgatgaaaaagatatcttgtactcagtgtcaggtcagtggtcaaaggcctttgaaattagggagggaaaaaggggagatatttttgagaaatatgatactgaagccttgcccatcacctcgctcacttctaggcgagcatggcaaaaggttgccgcaggtattcaggaaggtaatatgacacttgttgctgaacaaaagagaaagattgaggaagagcagcgtgcgttgagagttaaagagaaggagagcggcaaagcctgggaaagtcgatattttagtccgatcgagagtgatcctgttgttgaagaacttggagggaaattagccttgatgttggacactgacaagaagcaggggtatgtggaaattcgatga

SEQ ID NO: 359 - DNA, 1575 bp, Golovinomyces orontii
  source 1..1575: mol_type = genomic DNA
atgaacggcgacagctactcatccaatagagatcataaaggggtagagactaacgctcagataataatagattctggtcgtcacggctccagtagagaccatccttctctacgcgatgaaagaggaagcgaacgggaaagacggcgctcacgctctccaggccatagaagctcacgtcattctcgccgggatggtgacatagattcatactcgtcaagtcgcgattacagagaacgagaacgtgaagtcagatattctgggagggatcgccgaggtggtggtgatcgtgaatgggaccgagaccgaggctcttcaagacataatagagacttatttgatgatcgaagaagcggtggaggagctcgaagagctgtaagaaatgatcgtggtgatgatgccataatggcacagcaaggacgggatcgcaaaaaatctgcgtcacctccccccaaaaaaaaggaacccactcccgacttgacagatgtcgttcctatcttagagcgtaaacggcgtttgactcaatgggatataaaaccgccgggcaaagcttcaggaatgtttcctttacctggagctcctcgccaacaaccaatggacccaagtaaactgcaggcatttatggctcagccaaacggctctgttaccagtgctgccctcaaaccctcaaattctcgtcaagctaagcggctactcgttcacaatatccctccctcaatactgaagaaggatctttccttcgcgttgattgaattcaaacagcaaaatgatgcgaccgtggcactcgccatggatgggattgtaatggaaaacgaaaatccaaatgaaggagccaatggtttcaatacaggtctaactattcgtcgtcccaaagattacattgtgccaacagttactgaagagactccatacgagcctggagtgatttctaatgttgtaattgacacaccaaacaagattagtatatcgaatattcctctctatttaacagatgagcaggtcaccgaacttctagtttcttttggagagctaaaagcgtttgttctagtaaaggacagtagtactgaagaatcccgcggtattgctttttgcgaatacacagacccacaggctactgatatcgccatcgaaggcctgaacggtatggagcttggagagaagcaccttaaggttcagggcgcaagtattggacacactcaggtatctggtcttgaaatgggcgtcaatgccatgtcaatgctcgcgggtaccacatctacgggctttgaagaaggtcgtgttcttcaattgctaaatatggtgacgccagaagaattaattgacaatgaagattatgaagagatttgtgaagatgtgaaagaagaatgcgaaaaatacggcaaggttttagacatgaaagtaccaaggcccacaggaggaagcagacaatcaaacggcataggaaaaatatttgtgaaattcgacacaccagaatcagcaggaaaagcattgcgatctctcgctggaaggaagtttgctgatcgtacggttgtcacgacattcttttctgaggaaaattacgaagtgtcagcatggtaa

SEQ ID NO: 360 - DNA, 1497 bp, Golovinomyces orontii
  source 1..1497: mol_type = genomic DNA
atgtctctaaaatgggcaagaaagtgtgaacgatattgctgtataggtgtcacgtatttccccttattttttgtttacagtattacaacttgggccctttgggttgagacaaccattggatttctatctgccaagaccagctggattgatactgacaacatagggagcggaatatcatcgttaggaattatcttgtacatcctcctcaattggtcctacacaactgcagttttcaccaatcccggaaccactaccgacaataaaggctacagctccctcccaactcatgcttccaccatcagcaaaactttactatactgcaagaaatgtcaagcacataaaccggatcgcgcgcaccactgctcgacatgccgagtatgtgttctcaagatggatcatcactgtccatggctggcaacatgtgttggattacgaaactacaaggcttttctactcttccttggatatactacgcttttttgctttgtttgctttgcagtttcaggcttctgggtctggagagagatagtacatgaaggcgagtacactgaatctctaatgcctattaactttgttattttagctgttatatctggtatcatcggtttattactcgccggctttactggctggcatatacttttagcatcaagaggtcagactacaattgagtgcctggaaaaaacaagatacctacctactgctcaaaaacctaagtttaataaccctggacaaaccgagctgttagtgaaagataccggtgaaacagacgatgaagccactgaaaatgcccggcctattcacgagcttgattcccccatgatacatctcggagaacgagtcaactataatgattttgagcgcgctcgatctagaatccaatatgagaattatcttgacgaacaagattcggctaaattgcccagtgcattcgatcttggatggaggtcaaatcttcttcatctttttggaccaaataaactactttggttctttccagtggtaacaacgatcggtgatggttggaattgggacccaaaccctgattggcttatcgcaagggaaagaattacattggaaagagagaaacaaagacaaagagaaaattttgccggttgggggtccgaaaatttcaactcaagttcaaccaacctccaagaaggattatattacgattctgggtctttaaaatctagttcaaatttggaaaccgtagatttatctgatcggccacagtctaaagcagacagaatacttggaagaacaaacgaatactctgatggcgtttcgttggataatttacgaccactaggtcctagtgaccgttaccaagcctgcgagattgaagatcgacagagtttatgggccccagatagaaaagccgatctaggatggccacagaaaaatggtttgatagcgaataccttttcaagccagaaaatcctccgatcaaatgatcacagggaatgggacggacgaaaccaaggtattgactag

SEQ ID NO: 361 - DNA, 2736 bp, Golovinomyces orontii
  source 1..2736: mol_type = genomic DNA
atgggtagtcgtccagataaatgtccgccatgctttaattgccttctaccagccttctcttgcggacaattctcagaatgtaatgagtacaatggcatatgttcatgtcctccagggttcggtggtgatgattgtctatctccagtttgcggctctttggccaaaggtaatcaaagaaaaatgcgactcggggattactgcgaatgtgatgatggatggacgggtatcaattgcaatgtctgtacagagaacaaagcttgtaatgacctcatgcctaccaaagatggaggagtgtgttaccaaaatggcgaggtcgttcacgagaactatcagatttgctcagttacaaacatgaaaatcatcgaagttttgaaaggacggcgacctgaagttacatttacatgtaacagagatcataaaactgctgaaaacagttacctgcacaatagcacgagttatgattgcgaaaatgttaaatgcagctgtatacccggccggatgttatgcggggaaaatggttctgtggatatcacagatttcttgaatcagctcatcaaaggtcctgcaacatttcgttgtgagcaagaaaatggccagactagcaaatgcagattcaaggaacctgaaatggataaactgattcaaaacatttttggggatgatagcattcacatcaactgtcaacctggtgagtgtttatatcatactgatgtgcctgggtatcaaagacccatcaagaagataaacacgcctttaatagctggggtcattgcagttggatctctgtttatagtattcgtgttcctcacaatttggtatatttctaggaggaggatgagctacggtcccatccgcctcgatgactcggacgatgaaacctcaaaactaatgactatacataagcctgcttctctttacttcgaaaatgtctcgtataatctgaatggcaaacaaatccttacagacattacaggaattgcacatgctggccaagttcttgctattatgggtgcatctggtgctggttcaggcggtgaatatagaaatgtaattggcttcgttgaccaagaagattctatgcattcaactttaaccgttcacgaagtcataatggacagtgctcttctccgcctacctcgggatatgggcctagcagcaaaagagcaacgggtgtatgaagttgaaaagcagcttggaatatattctatcagggactcattgattggatctaaagaggaaggagagggccgcggtatatctggtggcgagaagagaagagtaggcatcgcttgtgagctggtcacaagccccagtatactttttctcgatgaaccaactagtggcctagatgcgtttaacgcatttaatgtcattgaatgtcttgtaacactagcaaagacatacaacaggacagtcatctttacaatacatcagccaagatcaaatattgtagcactttttgatcggctattacttctagcgaaaggtagagccgtgtattctgattggatatacgtgccccctggattcaatattgcagattatctagttgatttaacaatgcatgtgggaggtaagaaaatgcctccgaatgacggaattgttgctttaccagatgagacaacctcgaaaactagatcaagcagtactacggcaatcaaatctgttgaaagtatatctggagtaagtgttgatgatagcattggaaagcgtaaagattcaatcaaagccagacaagaaagagagctttacactcgtaagagaactagtattgacgggactggtttacaaaatcaagatcaacaggatacaaaactggtcagaataccaaggcaaaagttaaacgctgcaaactactctacagcggaagataacggccaattactttcagagctcagctatgaaaatggctttgacgtccttgtcactgcatttgaacaatctgaaatatgtaaaagagtccaaaatgaaatcgggtctgctatctccgacgctcaagccgccaacagtatgtccaatgaccaaagctcagaaaatggaccaataaacgtaacagttttatctggattcctattttatggattaactgatgacataccaggattccaaaatcgcttaggattatttttcttcattctcgccctttttggtttcagtactttgtctagcttaaccgtattctcttctgaaagaacaatattcgtacgagaaagggcaaacggatactattctccaattacttactttgctgctaaagtcttactcgatataattccacttcgtattgttccgccaataattatgggctcgattgtttatccgatgactggattagttcctgatgccaataatttcttcaaattcttatttcagctgctggatattgataatggagtggcaagcctaattgggagtctcattatgctcttcagtctgctttttgcaggcctactccttaatcatgatgctatccctaaatcagccctgtggctacagtctttatctatatttcactacgcatttgaagctctcattgtaaatgaggttacatacctaacactcaccgatgagaaatatggacttaacataacggtccctggtgctgttattttaagctcctttggcttcaatactcaggctttctgggctgatactctcgaacttggcatatttgctgcctcctttattattttagcttacggtgcgatgcatatgcttctaactgagaagcgttag

SEQ ID NO: 362 - DNA, 978 bp, Golovinomyces orontii
  source 1..978: mol_type = genomic DNA
atgtcatcgccaaaaaagattcctcgaattccatctttgccacatgaaacgagtatggacgctttctggcaacaggatattataaataaatggaatgatgaatgctctccacccaagaaaataataccaagtttcagactatctagtgaacaatttaagtctgtcaaaagtaaaccaaatccgaatctaagcaagacatcaacgaagttaggtttgaaagctaaagaagctcgaaagcaattttccgaaaacaaacaatcacttgccgaatcatttctctttgagcttgatggtgaaattacccaaggggagatatctcgtatgacagcatctacaggaggcgttaagatcgaatggagcaagaagcttaattctaccgcaggccgtgcaaactggaggcgcgagaccattaaaccactgactaaaatttccgatggcactcacacatcagtgtcttataagcattttgccacaattgaacttgctgagaaggttatcgatgatgaggatcgactgttgaacgtaatggcgcatgaattctgccatttagcaaacttcatgatatcaggcattagaaacaatccccacggcaaagaattcaaggcttgggccgcaaaatgcacacaaaaatttggtcatcgtgggattcatgtcacaacgaagcacagttatgctattgagtacaagtatatctggaaatgcgaggagtgtggtagtgaagttaaacggcacagtaaaagtgttaatctagatcggcatcgttgtggagcatgtaagggtcagcttgtgcagattacgccagcgcctcgactcagtactaagagctccgaatatcagtcgtttgttcgagaaaatatgaaaaacatccgtttagagaatcctggaagtccgcagaaagaaatcatgagtttaatatttactgcgggagaagttaacccagatttaatagctgaacaattaaataacatgtttatctga

SEQ ID NO: 363 - DNA, 5370 bp, Golovinomyces orontii
  source 1..5370: mol_type = genomic DNA
atggaggaaagtgcgagcaaaaatgatcacattcaagaagagcttctacacaacttctctctgaattttttagatgacaaaagattatctcaaacaacaacaccaggagatggttttactacctcgaaatttccgtacttcaagttacttccttacaatgtcgaagaagaaacagaacgtgatgccgctcttgaagaaatcttaaggcagctttatatagctgttaaggctaaagatatcttcgagttaacatgcgagcttcgagcaaaattggtaaagctttactacatgctctctctagctcctgggattgataggactgctatagatagatttgaaagcatgtttcgctatctgctcaaaagaaaaagatacttgaaacctggaaaggatctggttttagattggagacctttgtggagagaactcaaaagtcgaagacgaggtcacaaaaatattactgtgatgtgcaattctgcttcgacatactttgatcctcgagagcgtaaagctatactcgaagaaatactaccctattttgccacttctgatattacaggcgcttttgtcgtcatgggctgtttgaatctacttttgccaacaggagctgctcctgatgaacctgggaatctaaaaccacaggacttcttaccaactctttttcatctttggtcgctagtgaataggtcgaaaactgttgatattattttttttgatataatgtctcgtcttgccagagaccatctatcttgtgaatatgtccagttttcagagtatgggatcttcactaaagatcaatctgactatatcctaacttccttactgagattgaccgaaatacctgtgggtcaggcatcttccccttactgtggtctgattgatcttggggccggtttggccctgttccttgaaaaagacagaaaacgaaatccagttgcctactctatcgccagatggatcgtgatgtctttatcaccatcttctttagataaaccaggctctacattttcaaacttacaaggtctaatggagtctactgagaccttctttcacccatcgaaccacggaagctggacagatatattatcacaaattacgtatcatctcgttgacttctttgtgatgcgctggaatcgtgagaaaagtggggagctagaaactcctccagaccggcaagttgttttcgttggtcttttctccaaaaaagcgaaatctttaaattattttttcggtgccttccagggccttgcgtacctcgaaccacacctagttcttcctggggcacttcagagattttatccttcactacagggtcttgttgaagtccatagaactcagtcatcgctgtgcggactgcagatgaataaaggtctacgttgtcacatcaccgcattacttgctttagcattacctggcatcgatgcgaacgatctacaaaagactctccacaccttaaattttataacagcagtagcatatagtgttccattttacaatctcaacgaaggaaactcggaatattcagaatcttccctcgctattcaatgggtgcagggcgaaatggaacgcatggaaaatgatggtcctaacgtcaagattgactatagaactgaactaagtgacgagtatgaggctaaaatcttacgttcatctactgcaactcggtcaggatcacctgaagagaatgttataaatacattacctgccactttaacgcctctctttgccgccctttcgcccgagatatacgacaaagctttgaacaaagttgccagtttcgtaggaggtcatgttatctttgtaccaatgttaattgtgggtatccgaaatgaaatcgattgtaatgatgcagcctcggataggagtagtggtactgatgtcttacctcgtgatcgcgctttagtctggcatattagcatgctcagcatgattgtggtacatgatttatttgaaattgctatctacatgcaggaaaagtgcaaaggaatccctaccattcatatatcaaactatattcatcacttacttttgaacttgaccttaatatatcctaccgatggagctatgtatgagacaggtgtatatgaaaaaggaattgacattactgattgggctaagactacagacccccatgatctcacaatccgatggcacattccgtctaacgaagaaatcgaatttgccctggagctctttgagtcacaagttagaactgctttcaatcggctcactaatctaataagtgatgaaatatctgtgagcagaaaaggcaagaacaaggaatggtcagatgacgtttcaaggaacatttcacaattgcggctcatgttgtctggtatcgcaaccctttttgatcctaaaaatgcaggtgaaaacctcgatgttggtcttgttgacttgggaaaatatcaaaaagttcaaagcaaagatgttgataattcgttggtagagacggtagatgacgaggaaaccaggccccagtttcattatcgggcgggatatctactagaaagaggtggcaggatttacaatatcattcacaagcttcgacaagatataggccaattactatctcggattcatacattcttgttgacagagcaagaagacgatgttgcatgcttcacagctctatatcaagcctataggacttggataacagatgttggaaatgagagatccgcccatatgctcgaacgcatgataaagctttataattctgacgctcgtccatttaaaatcagtggattacgcaaagtatatcctagatcactgttgatcaaacgagctggagtctatcatttacaacgagcaaaacacaacacttcagctagacataaatctaacttggatgaacggctactctttgacttagcttcctctagtgtctctctgtatgcagaagttcgtatcaacgcccagtctgccttagaatccgccttgaaatgtttgattgatggacgaactgttgtgattccacttcttcttgatgcatttaggcaggcattgaatgatcatcaatacgatgtaataaagggatgtctctatactatattctacctgagtcttacgaaaacaatatccaaagattggcgctatgccccaagcgtgattgaattatacattagaaccctatcagttgataagccatcaattcagagaatcagcagcaatgcattatatggtggcctctcagaatttgggaaattactcgaccattatgttgctcttgatgaaagtgtaatagatgcttttaagcctaaagaggatatttcagccgagattaatttaaaacataatttaatattacagcgtcgaattaatattgagaaggagaagtcagctttggctctaaaactcattgatatatcaagaaactcacattggaaagttgcgcttcgatgctctatatttattctcaatactggacttcgagttcaaagtctagcttcaccagctcttattacactatttgtgaacggctgtatcgatgatcatcctggtctacgggtttgttattctgaatctctactccgtatcttcaattacatagagatccgggggatatatggtcatagctttgagaaatatattcgtgaagaggagaatcaattaaattttcttaagatttctgtgcaaaaagataatccaaattggacccaagaatacctagatggatttggaaaatcaggagtgcctgaatactacattgatagagattttcctggttggttattgtggggtaaaaatttccgtgcatgtcgagcatcccctcttccgatgacagattgggatgagttggaacaaaaagctagaactcaaattggctctttaataactcgtgaatggtataccaaattttttgggtatatgaagcaagagcctcgtgactcggcgtctgaccgctttcgggcccataatgccgctctcctagttcaaacctttgatcttactgttaacgacttgacagctgcaacatttcaggatgtcaaggaacttctgaaagatatttatggagatggtacagataagcatcaacaccgtgcagcggcagagattataggggcattacttacttgtgtcattggaaatactcttgaaaaacgtaacaaggtatggtcgtatactgttcctatactacttcaaattttttcggatggactgacccccgagaatatatcctattggatgagttgtgtacacatggtgattgggggaagagatcctcgacgtgcacgcgaaatttatgatgagcttgtgtcgtttagattgggtgtttcatcagatactgctttcaaggaaagtgcaaaactcctaattcttgagcttgctatccaggatgccgggtggcactttcgttcagaaaaacagattctcgaaaaatttatcgctcatatcgatcatccatataaggccgttcgagaagcaataggacgtacaattgcgtccatttatcgcacacgttattttgaagggtacatgaacgtggatgatttattgaatgcaaataaatcatcgtcatcacttggtattaaaccatatgtgccaaccgaagaattcacatcaaccatcaaagatgtgttcaggcgaattgaaaaatggcgccttgagagagaacctgggagtaagacggttcttgtttggctggatactactcttcaatcatacgaatgtactcagttacaaaaattcttccctgatgtattcatggaaccacttcttcatatgatggacgttaaagaagatccagaattacaacgtctagcataccttgtctaccgagaagacgtagaatttatctcagcattgatcagaattggaaaagtatcttcctcctggcatcaacgtttaagaactttgatcaatatgcaaaaacatgctctcttcaatgctgtctctgacatgcttgaagacccacaacacgaagtccgccaaggagcttctagtacactctcgggcatgattagatgctccccaatagcactacgtagtagttttctatcagccctaaggattagatttatagatgctttgaaaaagaacccaatgccaccaagaacacccggaacaagtaccccagtcaacaataaccaacaaattattcgtaggcatgctgcggtgctagggttaggagcccttgtaacagcgttcccatatgcaacaccgccccccgagtggatgccagagactttagcaatacttgcttcgagagctgccaatgatccaggctctattggaaaaactgtcaagcaaattctggcagacttcaagaaaacacgacaggatacttgggctactgaccagaagtacttcactccagaacaattagaggatttggaaggcgtactatggaaatcttactttgcataa

SEQ ID NO: 364 - DNA, 918 bp, Golovinomyces orontii
  source 1..918: mol_type = genomic DNA
atgtcgagcaaacaaccatcgaagtctgtatttgtcggtaatattccgtatggtctcaccgaagaacagatcatacggatatttagcactgctggcaaagttcttggcttccgacttgtttacgatcgagaaactggccgaccaaagggattcggtttcgttgaattccccgattcagactctgcgtcttctgcagtacgtaacttaaacgactatgagattatgaacaggaaactacgtcaatccgctataccccttccaacattccctcctaacagtctaccgatccctccaaccccatcacacataatggttccacatacaaatcactcgggaattccatccacaataccaccccttcctcttggtgttgacgttcccgcaggacttaattgctccgatgccatttctcgtacattaaacacacttccacctcaacaacttctcgatgtcctatcacagatgaaagcccttgccactactgacgcggtcaaggctacagaattacttcaccaagcacctcagctctcgtacgctatttttcaagcccttctactcatgaatcttatatctgcggaagctcttggatccgttgttgaacaggctaccgccgccgtaacaccggcaaatcaccaaatagtcccaaatcaacaaccagtaccaccaaatttcgtctcaatcccacaaaatacgtatccccctaattatcaaccacctcagcagtcatacggggtagcaccaccgcgtgctccacaacctatccaacagcagcaacctcaacagccaccagctgctggagtactagatacagatcaacttatgcagcaagttctggcgatgcctcaagaagtcattgatagtctgccagtagctgagaggaaccagctactcgcattaagagcgagttacgggcgttga

SEQ ID NO: 365 - DNA, 4626 bp, Golovinomyces orontii
  source 1..4626: mol_type = genomic DNA
atgtctggtttcggtggatttgccgccacaggctttggcacatttggtacaaacacaagcacgggatttggcgcagctactagtggtttcggatcaaacaattcttccagtacaggagcatttggtaatccaagcgcattcggaaatacaacaaacaacgcgcttcggcataacacctcaggctgctcaaccacgaatgctttcggttcgactggtttcgggtctactacggctccaacctcaggattcggtgctggtaatacaggaggaaatggtttatttggggcatctacgacaaactctccttttggaggtgctgctacaacatcatctgcgtgctggagaatgtcaaggaccggcagtgttccatttcaagcatttgttgagaaggaaccaaacagtactaccaatcaacaaaactcatttcaaaatattgcttttcaggcaccttaccaaaaactggcagattacaatcaaggacgacgttttggaaatgggagcaaccaaccaggtgcattcggtcagtcaaacttcgggggcttcggctctaataactcgggctttggcgcttctaatataacaactggagcaaacatgtttggcactgcaactacaaactcatctttcggcactatccagcaaccttctaccggatttggtacaggtacagcaacaactggaaatagtctttttggagttttcggatctcaacctgctgcccaaccgacgggtggcttgttcggttcttctaacaccggttttggccaacaaaatacgaacgcattcggcacaaatggttctactgctaagtctcccttcagcttcgggactccatcgaataatacaaacccgagtccttttggtgcgtcaacaaccactggcaacaatcaacagcaacccgcctctacgggatttagtacacaacaatctacttcaaatggatttggaactacatcactttttggcaacaatcaggcaaaacctgcaggtggtctatttggcacgcctacggcaactaattcaactagtctttttggccagcctcaagccgctccatctgctaacgtttcggcgcacccaatcctaatcaaaacaacaatggtttattcggaaataaacctactggctctggtacggacaaccaatggtacaaatctgtttggaggctttggaacctcaaatcaaaatcaaactagcggtctctttggtaatcttaataacaataataataatcagccgaaaccatccgtttttggaagtgcacagtctactggagggagtagtctttttggtaacccaggaacccagaatcaaccttcgctatttggaggcttcggtagtagtcaacagcagcagcaacctaatcaaaattcacttttcggttctagtatcaattcattcagcgttcaaaatcaaaatagccaggtgagcaaccctggacctattgcaacaccactctctggtagtagaaactctgctggcccgaagaacgctgctattccactctacaaacttaattctggctcagcctcacgcttttcaactccacagaggcgaggttttggattttcatatagtacatatgggtcaccatcaagtgccacaagtacagccagtactccaggtgcattcagcaacaataatctgcttggaacaggttcatttagccgtactctcatcttcaactttggcggtactggaagtgtcaaaaagttgacgataagcagaaatattcgatcagacctatttggtccactgaccccacaacctcagccaacagctatggcaccatcatctgggatccttaaaaagcacgtatcatttgactctaatgttaatggaaatgggatggagctacaaaactcggctttaaacgtcctcattctaataatcgaacctgttcctaatagtaacaatcaactagcaataattcttctgccttgtatgaatcgtattcaacgacaaacggtatctggcttcactgtcggtcgacatggtgtcggctctgttcaattcgatgtgcctgttgatctaacatctgtaaacttgaatgatataatgaacaatattgtaagaattgaagtacgtcaggtaactgtttatcccgacaactataagaagccaccaatgggaaagggcctcaatgtaccttccacgatcacgttagaaaattcttggccgcgtaaaaaggaccgtaaaactccacttactgaccagtccggcatccgcctgcaaaaacatatcgaaaactcaaaagggttgagagtaccacattttaccacatacggtcttccggaggaggatgaggaagacgatgtaatggaatctgagctttctagtcacgaacagcagacacctaatttcgatagctacaatcaatcctttgcatcgacttctttactaacacaaactgaatctggacttgaggatacgtttgaatttcgaaagtctaagagatttcttccaggaacttttgatggacaattcgaatatctcgagcacgtatcttcagcggaaaatcaatctttaggctctcagtctgaatgtggtacggaagaaccaactgaaaattacgacgttctggatgacaacgagtctgtcagtataatggatcaagatatggtgggtacttatcctgagaccttaaacaacatgcggctattgaatccactcagtgatgaaggggaagatccagagatgtcgcgtcttgatgcatcgataagttataacactccatcaaagggacattttttgccttgtgatgactgggtgagcacattaagggcaaccgtcagtcctagaaagaaagatcatgccaactcaaaatcgatcatagcagatgagcaaggattctcaacgagtattgatttaatgaattcactctttggaaaaacaagaagcccaagtgaaaacttgaaggccatcaaaaaagacaaatatctgaggtttgtagcatccctatccactaataccgtggaaaaaatatttaatcctttttgcccaagtttaaatgagactgagagatcacttgtcggacccatgaaacctagatggggcttcgatggttctcgtataaaagatgatttacttacgggttctaaatcagaaatagtgtcagaacaccgcgatgtccgttttgctaagttttctaatgaagcatcagccgaatttttgaataaacataaggcaatagcagtaattgattgttctagtggggttcctatggcagttcttcccagaagcattttgtttaccgactttgttgatgatcatgctcctaaccatgagaaacttgtgtggcaactagctagcattctttgggatccgcttcaagtatccgagcaacttagagaaattccccatatcatatcgcgcatacgaaaagacaatctctctaaattttggaaaaagatggtggatgattcatcttcacggcaggttgctctggcgaggtgtaatgaagagaaagttattgcttgtctatctggccataaaattgatgatgcatgctcatatttggtaaatgctggtgacttgcgactcagcactttaattgcacttgttggtagcaaggatagcataaaagatgatatacggtttcagattgatgcctggcaaaaatcaaatatgctttcagagatgacacagcctattcgagctctttatgaaattttggctggtaatgtctgtgtttgcagtgaagttaaaggagcgcctgaggatcgagttgagtctttctctatctccaagcgttttggtcttagttggcgtcaggcatttggacttcgattgtggtatggaatttccagtcatgatcttatagaagctgccgtggagcggtttacttgtgatatttccgaagaaaaggaagaatcatggcctactccatggtacatcgagcagaaggtaccattactatggcaagatccatgtgttaatcagcgtgaagacttactctgggggattttaaaactttatacatttgggaattctgatcttgaggatgttcttcgacctgaaaactcgcaactttcacccatggatattcgactctcttggcaacttagtcaagctatcatatcctctggttcagtaaactttgctggcgacaatgacgagaaatctgatcggactacactctcatttgctgctcaattagttaatgagggtcattggctagatgccatattcgtcttactacacttaacttcaccccatgcaaggtttatggctattcaagaacatctcggtcgcttcgcaggctatattggaggggaagattggtcattcaacgaagcacatgaaactttctctcgagaggtagctcccaaactaatcgttgaactggattatagctctttacggagtctactcgtaggatttgccggaaaggaccttaaaataaaagactggtcacttggagttggactttacagtctaccagctgatgaattagcattggagagattattatccagacttccgtctctagcggatgagtcacggcacccgaatttcatggaacgagttgctatagaaacaatgagctcaacagctgcgaacgctttactaggagtcgtaaagaatagcgacgtaagttcttcatcctttcttttattttcctaa

SEQ ID NO: 366 - DNA, 1758 bp, Golovinomyces orontii
  source 1..1758: mol_type = genomic DNA
atgaacgtaataaaactacaaagaaaatatcctcaatttgaacaacatgagattttcggatttcaggatgcattccgaaagctagatactgaagacaaaggttatatcgacgaagcaacagctattaaagcaacacagactagtgaaagacagccatatgatgttgtgcgagaagccttaaaagcggtggatatagattcctcaagaagagtagagttggacgactacgttgggttggtttccagacttcgagagtcatctctaaccaagagaaatattactacgggtcagatttcccctgcaaatgatgtcaaaggctcctctgctaacgttacgcatacaattaatgaagatgaaaggtctgagttcactcgccacatcaattctgtcctatcaggggatccggacattggagctagactaccatttcctactgatacatttgaaatgttcgacgagtgcagagatggtcttgtcttagcaaaattgatcaacgatagcgtcccagatacaattgatgagcgtgttcttaatcgtcctggaggcaagatcaaaaccttgaatgcttttcacatgacagaaaataacaatattgtcattgaatcggctaaaggaataggatgttcagttgtgaatattggaagtggagatataattgaggtacgagagcatttaattctgggcttgatctggcaagttatacgaagaggtcttctcggaaaaattgacatcaagatccatccagaactctaccgactattagaagatgatgagactttggagcagtttttgagattacctccggagaaaattcttttgaggtgggtaaattaccatttaaacgctgctaattggcccaagagagtaactaatttttcagctgatgtcaaagattcagagaattatactgtgcttctcgcacaaattgccccagaacagtgtaatcgtgatcctcttcaaacaagagatctttttagacgggctgaacaattaaatctagcctttgtggcaaatttatttaatactcatcctgctcttgatcccataactgaagaagagaagttacatgttgatgattttgatgcagaaggcgaacgagaagctcgagtttttacgttatggctcaacagcctagacgttcagcctgtaattaactccctctttgatgacctacgcgacgggactatacttctccaagctatgacaaagtatgtgaataggttaccaacaaatggatcagaaatgtcaagatttaaggccgcaaaatcgatttcactcgtcggagtccaaggagcagatatcactgatggtcagcgtactttgactcttggtctagtttggcaacttatgcgaaagaatatctcagaaacattgtccacgttagcccatcggcttggaaagcgcgaaattactgatgctgaaatggtaagatgggcaaatgatatgactcagaaaggaggcaaaagtttagctatccgctctttcaaggatccattaattggaactggagtcttcctcttgaatgttctaaatggaatgaagaagaattatgtcgactatgaattagtaacaccgggcaaaagtgatgatgatgcgtatttaaatgcaaagctcagtataagtattgcacggaagatgggtgcaacgatttggttagtcccagaagatatatgccaagttcgcagccgtttagttacgactttcattggatctctaatggctacgtatgagaggaataataaaacaaccacaaactag

SEQ ID NO: 367 - DNA, 3543 bp, Golovinomyces orontii
  source 1..3543: mol_type = genomic DNA
atgcgaagaaattcatcatcaaaatttaacacatctgatgatgaatctgatgagctaggacgctcagagcagaagctttatcagcacacatccttcatcagattaagacagacatcaaaacacaaaatttcttctcgtcaaaatgataagatgatagaaaatatggggaaagcgataagttttcatgagagttatgaaagttcctcatcgtacgagcgtccgtctcgaagatcttgtcgaaaaaagactagcaagagtatgaaagatatagaagaagacaaagaagatttcttctccgaagaagagtttcaagaattgaacccaaaagttgcgaatatccaagaaacctttcctcgtttttcagaacatgattcatttcgactaggtaaaagtcctttaatattttgtcaaggttgctcaacttcgatacataaactctgtctgggccatcgtagctcaagagatcatattgttacaaaagttggctttgaggactttgcgatgcaatgtcgacgatgcattggagctgcaaggaataaggacaggactgcaccccgcctagacgtttgcctctcatgtcgagaagcaggtctatcatgtgctccattctctaccaagaagtctgctcggcaagaggaaaagcttcggcaagagaatgaaggagtagatcctataacgaggattcctactgaacttcttaatagcactaagagtgtcttattcaggtgtaaaaattgtcatcgagcatctcattttgagcatctgccgccccgcacaaaattatcggcaagatctcacgatatcgaaaaactccgcaaacttagattgaacgagtattcttcagactggctatgtaaagactgtcgggacgctccagctaatgtccaccgtttgatctgttggagacctctcaatcctgatatgtaccatgacgagcaaaaagcagacgagctatgtgaagatgacaaagaatatctaatcaagtggactgaaaaatcatatttcgaatgcaattggatgccaggtagctgggtatgggtagacgatgagataaatatgtatccaatatggaactttgaagacgctgttccggaggagtttctccgtgtagaaataatatttgatgttcgctatctcaaaggctttattcctaaatccgaaaaagctgataatgcttccatggatatgattatctcaatatttgttaaatttcagggcctttcttatgaagatgctgcttgggtgaagccacctaaatcggacaactttgagaggtatcaaaattattttgctgcgtataatgaatatcttgccgggaaatacttcaaacaatctttaacttcaagcatggagaaacgattgaaggatttcagaagactaaatttttccaaggagattgaatttaaagaaaagccttcggagcttactggggggcagatgatgccatatcaaatagaaggactaaattggcttctctataatttctatcagaagaaaaatatcaagaaatgggctccatcattgcgtgttgtctcttattacggtggtaaaatcacacgtgaattagcaatgagatatgaaatgtatcctcaaggatgttcttatctaaaagctcatgtaataattacatctttcgagacaccaacggacgaacatagcagaacttggttctctctagttgatgagggtcagcgcctcaagaacgatagaaatattttatatgccactttaaagggtttgaaaatcccatttcgggttcttctaactggcacaccactacagaataacaagcgggaactatttaaccttttgcaatttcttgataatggcatagatgccgctaaacttgatgaagaatacaaagagctgacgaatcaaaatttaccccaacttcatgagcttatccgtccatttatcctgagacgtacgaagcttcaggtgctgaagttcttaccatctgtgactcagatgattattccagtgacgatgagtgttgttcaaaagaaactctacaagtcaatcttagccaagaacctcgattcaataaaatctgtctttggtcagcatgatacaacttcaagaacaatagaacgtggaaacctgaacaatgttttaatgcagctccgaaagtgtctctgtcatccatttttgtacagctcagccattgaagaacgttctctgagcgaccaagttctttttcgaaacttggtagatgcttcatctaaattcaaactattggagatcatgttacctaaattgatcgagcatggtcaccgagttcttatcttcagtcaatttctcaattatcttgatttaatcgaagactttttgacaggccttgaaattccttttctgcgcctagatggtaataccaaatctttggagaaacagaaacgtattgatgcatttaatgcgcctgactcgccctttttcgctttcttactctctacaagagctggtggcgtaggaattaatctagtatctgctgatactgtccttatcatggatcccgattttaatcctcatcaagatatccaagcactttctcgagcacatcgtattggccaggagaaaaaggtactcgtctttcaacttatgactaaagatagtgctgaagaaaaaataatacaaataggccgacggaaattggcattggatcaagctctaattagaagaatggatgataaaaatgaccgtgactttgacgtagaatcgattctcaggtttggtgccgaggctttgttcaatgaagatgatcaaaatgatattctttacgactccgcctctgtagacaagctgttggatcgtacgcttaacagaaatagtgctgctgctgctgatgatgatgatgaaaaaacggccgaggcacaattttctttcgcacgcatttggtctaaagataaggattctactattcaatataatgatgatgacgaagattcaccagacaacattcctcaattctcagcctgggataaaattttggagcaacgtgaagcagatgccgccttagaatcagccaagactactcagaattttggtcgtggcaaaagatcaagacagattaaaaattatggaaaagataatcatgagctagatgatgaaacttttacctctccaaataaaaatgaaaatgaagattttggacggcaagataaaattgacaaagatcctgaattttctgaagctcttgaatccctggatgaagaagattctgactatgaccaaaacaaatctgctcggaaaaagaaaaaatctcaaaaagattcttcagcagaatgtactttgagctcagaagctccatatcaagtacttcccgcgccgttttctatcggtgatggaatatgtgcacgctgtggccttttacatctttacttatcaagaatatgtcctatcttggcttcggatactcaaatcagactcatgcttgataagttagtcagatttgaaaaaatggcatcccaaagggataacatggaaagagttctccgactgcatttgtttgatcgattgcgccgaaagaaaaaatgtaacaatttataa

SEQ ID NO: 368 - DNA, 627 bp, Golovinomyces orontii
  source 1..627: mol_type = genomic DNA
atggcatctgagctctttttgtcagaggaatcgattctctccgtcacggaggacctagtacctctcccaacctataaagaacctctaagactttatgaggacctcggaccaggttgcggaggacagatttggccagctggaatggtcttagcacgtcatatgcttcgatatcaaaggagttcattaacccaagcaagaatcctcgaactaggcgccggcggtggcattgttggcctcgctgtggccattggatgttcaccgagtcgacctatctacattagtgaccaggaaaatatcatagatctcatgcgtaaaaatatagcaataaatgatctcgaatccctcgtgcaagaacttgagctaaattggggcagtcaacttcctgcagaaatcgtggaacaacgtccaaacataatcctcgccgcagattgtgtttaccttgaatcgtccttccctctgttgttgacgacactgaaagatcttctcaagttgtgtgaagataccgatatgcgtttcttaaaagcagctaagaaaatcttcatcgtggaagagcccgaggatgacagtaggatatcattttctcgcgagggacttttcttgtacacactcaagttaaaggcccactag

SEQ ID NO: 369 - DNA, 1299 bp, Golovinomyces orontii
  source 1..1299: mol_type = genomic DNA
atgggccaaaatctttcacagccagtaactgaaaagtcctctgccgatggtggtaatgaaaattttatttacggggccgcatctatgcaagggtggagatctagtatggaagatgcgcatacaattgttctagacctacaagtaaccgctgaaaatggagaagaaaataaggtaacagacttggactcgagactatctttattcggagtttatgatgggcatggtggtgataaggtagcgcaatttgctggagaaaacatacatcgaattattacatgtcaggagtctttcaaaaatggagataatgaacaagctttgaaagatggttttcttgccacagatcgggcaattttaaaagatcctcagtttcaaggtgaactctcgggttgtactgcaactgttggcatactatctaataaaaaaatatacatggccaatgcaggtgactctagggctgtgcttggtatcaagggccgagctaagccattatcttttgaccataagccaatgaatgaaggagagaaaatccgtattatttctgctggaggcactgttgagtttggacgagtcaatggaaatttagcactgtcccgtgccattggtgattttgaattcaaaaaaaattcccatcttgccccggagcagcaagttgtgacggcttatcctgacgtcactatacataatatttcaaatgatgatgagtttatggtcattgcttgtgacggtatttgggattgtcagtcttctcagtctgtcgttgaattcatccggcgtggaattgcagcaaatcaagaattatccacgatttgcgaaaacctaatggataattgtctctcctccagctctgaggttggcggtattggctgcgacaatatgacagtagtcatcgttggacttttgcacggcaaaagtaaaactgaatggtatgaaaacattgctaggagggtttcggagggagatggcccatgtgctcccccagaatatgctgagttacgtggacctcttatccgtaaaaatttcgacgactctgataacggttttcagttagatcctagtaaaggactagcaaaacatctccggcgtattattctccttggagacggctctgattcattgactaaccctgacaacaaactaatgtctgatctcagcgacgaagatcacgatcttggaagtcaagttagtaaagttcacgctagtagtcatgacggttttggtttggggcatatcaagtctgggaattcacctaaaacaaatgcaactacaactacagaaaacttggcaagtgtgaacgaatga

SEQ ID NO: 370 - DNA, 2124 bp, Golovinomyces orontii
  source 1..2124: mol_type = genomic DNA
atggctagtagcagtcggagagactccagtctgccagcaaaacccaatttgcgactaaccagtatatcagttctttctcttctacaacgaagcatcttcatgctaattagactcaagtttccagatccttttgctgtcatcacgctcagtggcgagcaaactaaaacaacaaatgtcatcagaaaaactctcaatccttactggaatgagagctttgacatccgactgacgctatccttaggcgagcaacgagacagtattctagctatacaaatattcgatcagaaaaagttcaagaaaaaagatcaaggcttccttggtgtaataaatgtccgaatcggagacgtagtcgatttctcatccgatcaagacgaaatgttaactcgagacctaaagagatctactgataatctagtaattcatggtcaactaatcattaatttatcgacaaatctctctgagcctctaccaaatgttgctcctaccgccagctctaattcttctttgaggctaaataacgtaagtattccccaggggccaaccttttccaatcttctcggagcacttggacctacaccaggtcatgcgcctgctgccggcagcattggctcgtctaatagttctccacttcctgggaccgcagcgaatcgtcagccaggtgttttcagttctttcgaagatgcgcagggaagacttcctgccggctgggaaaggagggaagataatcttggaagaacatactatgttgatcacaacactcggtcaacaagttggaacaggccaactgcagggggtacaatagagacgcaaagaactgaacgagatgcaaatacacaggtagagcgtcaaagacatcagaatcgaacattaccagaggagagagctgctacaatgctggcgactggtgcaacaactgcaggtactggagagcttcctccattatgggagcagcgccaaaccccagaaggaaggccatatttcgtagatcataacacaaggacaacaacttgggtagaccctcgaagacaacagtatattcgaatgtatggagggccaaatacgaataatggaggcattcaacaacagccagtttcgcagcttggtccacttcctagtggatgggaaatgagactcacgaatacggctcgagtttatttccgcgattttagaagaaaactcatctacttcagatctcaacctgctctccgtattctctctggtcagtgtcacgtaaagatacgcagatctcacatatttgaagactcgtacgctgaaataatgcgtcaatcggcaatggatttaaagaagcgactaatgataaaatttgatggcgaggatggtttagattatggtggtctatctagagagtttttttttcttctttcccacgaaatgttcaaccctttctattgtctatttgaatattctgctcacgataactacactcttcaaataaaccctcactcaggaatcaaccctgaacatctcaattatttcaaatttattggtcgagttgtcggtctcgctatctttcatcgacggtttcttgatgctttctttattggagctttatacaaaatgatgttgagtaaggcagtttcactttcagatatggagggtgtcgacgcagacttccacaggagtcttcagtggatgcttgataatccgattgaaggtgttttggaacagactttctctactgaagacgagcgatttggtcaaaccacaattgaagatcttaagcctggtggacgtgatatcgaagtcaccgatggaaataagaaagaatacgtagaaatgatggtcaaatggagaattcaaaagcgtcgagcttgtaaatgtcttgacgagcgagaattggagctacttattggcggtattgctgagattgattctgatgaagtaatcaagtttttctggcaaaccattcggcgctgggacggtgagcagaaatctcgactattgcaatttgctacgggaacatctaggattcctgtgaatgggttcaaagatcttcaggctggtgagataaataatcttccaaaatcccacacatgtctcgagaccttgcaagcaaagcttaccatggctgtagaagaaacaatgggattcgggcaagaataa

SEQ ID NO: 371 - DNA, 555 bp, Golovinomyces orontii
  source 1..555: mol_type = genomic DNA
atggcagaaattgagacctgtgtcgagcaaaataacaatcttccttctcaagatgacggaaatgatgaagatgaaatatctgcaatgaaaagacgcgtagctgagatggaagaagaagcagcaaagcttcgcgaaatgcaggctagtctagaccaacaaagcaacgacatgcgtgacgaccctgaagatatcgactctagaagtatcttcgttggaaatgtagactactcctcttcgccagaggagattcaagcacactttcaaagctgtggctcaatcaatcgtgtcacgattcttctggataaatttaccggtcatcccaaggggtatgcgtacgtcgagttcactgaaccgagctttgttgcacaagcccttgtattgaatgaaagcgtcttcaaaggacgtaaccttaaagtagttccaaaacgcactaatatccccggaatgagccgtggtcgaggcagaggtggatttcgtggacgtagttatgcaggtaggggaggatatgtcccaagaggtggaggtggtcgagggcgaggatttgctccttattga

SEQ ID NO: 372 - DNA, 351 bp, Golovinomyces orontii
  source 1..351: mol_type = genomic DNA
atgtctgcaccgcactttgcaaattttatcataaagcgaccatggcttatgaagatatttgagccgatgtctaaatggtacacgaacgccgcaggatacaggaagttaggattaagagccgacgatctcatcccagaggaatcagaaatagtcttgcaggctttaaagcgtctcccacctatagaggcatacgaccgagtctttcgtatcagaagagcagttcagtgctcggtatcacaccaattgcttcccaaagaagaacagacgaagccagaagaggatgttgaatatttagccgaggcaaaagaacgagcagatttagagtccctatctattaataagcggaagtga

SEQ ID NO: 373 - DNA, 1089 bp, Golovinomyces orontii
  source 1..1089: mol_type = genomic DNA
atgtcaaatagtagaacaatcaatggctcaagagcactaccaacacctctagagagctgggccatgagaagaggcgacgacacctttaacgtaattgcgggaagtctcggtggctttatgtcgggcctagttacatgtccattggatgttatcaaaacaaaactacaggctcaaggtggattccgtatacagaataaaaatgggaaaagttcaaatatggtttatcgagggatgattggaacagcaggagttatatggcagcaggaaggtctaaaaggcatgtacagaggtcttggtcccataattctaggttatcttcctacctgggcagtctggtttactctgtatggaagatcgaaacaattcattggaagacatattgtgacagaaagccaaaatatcgttaacatttggtcttcaattgttgccggtgcatgttcctctatagctactaatcctatctgggttattaaaacacgtttaatgtctcaagtcagccaaaaggcactcggaaacaacgctcgaccaccatggcactacaaatcaacattcgatgcggcaagaaaaatgtataggacagaaggactgcgttctttctattccggacttatcccagcacttttcggattaactcatgttgccatacaaatccctgcctatgaaattttaaagataaaattcactggacgagggatgggtgagtcttcaggggatgacgactttaaacattattcaggtgtgatatcagcaagtttcctcagcaaactcctggctagctctgtaacctatcctcatgaagtcttacgaacaaggcttcaaacacagcagaggtcatacatttacacaagcattaagcctctagctcttgaaaatggccaaaagacaagtaataataatccttcaaatgcatccaagttacagcgctatcaaggaattgaaggatggagagctttttatgctggcatgggtaccagcatgatgcgtgcagttccagcagctactactacactagtcacatttgaatacgctatgaagcatcttcgcgcagctaaagaagagggaagacaaaaatcacttattatgtattaa

SEQ ID NO: 374 - DNA, 1338 bp, Golovinomyces orontii
  source 1..1338: mol_type = genomic DNA
atgaacggaataagtcttttgagttacggtcgaggaagttttagctctaacggatggacttgtcgaaaatgcttctcatcaatacgacgtttgaaatcctctaaacctcaaattagatataaatcagatcaaaagaacccgccaagattaagatcgaaacatttcaccttttttgccgttgcagctggtgcaaccggtattgcggtggcattcacattcagggacaacataaaacataccttcaatgcaaccctaagatcgggtagagtcttgcaaacactaatcctcaatatgttagattatcgaaggaccttgaatcagaatgagaagatcgaagatacagaacagcgcaacaattcattgaccgcctgtcatcagcgatgtgcagatcggacgttgaatattatgaagaagaacaggggaatattcataaagctaggacaacacttaagtgcgatgggttatctattaccgcttccatggacaaaaacttttattccgctccaagacaaatgccctgaatcctcattcgaatcgattgaagctatgtttaagtcagacaccggcactgagatttcccaatatttctctgaattctcacatgaacccattggatctgcgtcccttgctcaagttcacacagcaagaataagagagacgggacaacaggttgcagtcaaatttcaacatcctgccgtggctgaatgggcaagcttagatctcatgcttaccaaatttactttttctacactgaaaacattttttcctaatatgacttggaatgatatcatttggtcgaagaaacggattttagtcatggaaaatgtatcaggtcatcgcccagatgaccttgaatatttggacaagaatggtattgatagagacgaacttgcaattcgatgttgtttatacgaccatggtctctatcgtgacatccccatagagactcgtcgctcctatgctaagctttggctgccaatgcgtaaatatgccaaagaagtcgcgggcatcactgatgacaagtttatgatatttgcctctgcaataactggacgcgaatttcgcatcgtacaaacagatatttccaaatctcatacggcagaagagaaagaacatatcaacaaagctttgggacaaggaatgttacaacaacttgtcgaactgctggtcagtttggatgaaaacttacatactcgacatggacctttaagaactttcttgattctagccattattgctctcaaacaatctttgaagaaagtctttttaagagttcagtttaggctcgaggcttttgaacttgctttatcgtcaaaagaagctggcaaggctatataa

SEQ ID NO: 375 - DNA, 1920 bp, Golovinomyces orontii
  source 1..1920: mol_type = genomic DNA
atgcgagaggagcattatgaagagaaaagtcccatgagaactgagctcaccttcgtctctcgggaaaagccaattcctttactcaatgtatttcaagtctaccaaccggtcattgtagcgtcaactgaaaaccgtaagaacgattcagcaatttcctcccacaaagatacagacagagaaaaaaatgtgtctcaaagttgtcagatcagattgatggaatactctttcgctaatagttttgggaaaccatttgtcgctgattacacgccacctccatgtaatttcaatcatgttattatgaattttactgcaacttctcaaggtcggcaattcgataggcttgcgataatttatctcggagatattgaagtatggagaacatcaactgccgaaccaacaagaaatggtattttctttgaatacacaaaagatatgagtgcatatttgtctctctggaattcacctcaaaaatttatatttgatcttggaaatctgattaacgagaaatatactggtccaattaataccactctgactatgaccttttctaaaacaagctcaataaatgagtatgcgagccaaatcattcccgtatcatcaagaaagtcaggtttaaacgcttcaagtgtttttcaattgccccttgatactgcaatcaatacagttacgcttccccaaagtgccaaacgagcgatattcagcttaagcgcttgtggtcaaggagatgaagaattctggtggagtaatgttttacaatcacacacacaaacattttctcaaagaaacttgacattatttggatattctcctttccgcgaagttcaagttctcatcgatggtcaacttgcaggtgctcactggccatttcctgtaatattcaccggtggtatcataccaggactatggcacccaattgtcgggattgatacctacgatcttcgagagcatgagattgatataacaccatggcttggtgttctttccgatggttctccacataaatttgaaatacgtgttgtaggtattcaagatcataataatgggaatgcaacactgagtgagattgttggaagtaattggttggtcaccggaaaaatatttctttggctagatgcagaaaaagctgctatcacgactggcagtcgaccagaaattcggattaccgaccctgtgatcagaatctcaagctcgttttcccaagacgcgatgaatcaaaatgagactttagactacacggtaaatgtcacgcgcagtctttctatttcctcaattatcaataccactcagggctctcgtcaagtaagttggatgcaaaatcttagcaccactaattatggtcattttgaagcacatggtgattttcaggctactggacaatctactactggtgtcgataaatcgtcgggagatgttaactacaagatggattattcgtatccattgtggacgagtacctacggaaccagcaatgaactcggagactttgcgattaaagctgaaattacccgcggtcttgccataaaagttgaaggaactggtgcatttccatcaggaatggaaccattcttccaagatttagataacagtcaaacctatggagattatcccgtctcacaacttgagactacccagaattgcaccggttattattcctcttctctgtcagctgagagatctgtgtcatatggtgacacggcacaagaatttaatttttttggatctatacatggaccacagctgttagaattgtataaccgaaatgtagaagccatcaacggaactttgacttatgaccaggagcgtattttaggtagggaaatggatcgcccctcagtctcagctcttaaaaaagatgtcgatactgttattttttcggacaatcatcgaaaacgactagatagattccaaaacgtttattga

SEQ ID NO: 376 - DNA, 414 bp, Golovinomyces orontii
  source 1..414: mol_type = genomic DNA
atgtctctcagtggctttccaagagttaagccatctgcaattgcacttggaacgatctttagccatgctacgtctctcgccattctcgggccaatatttggcgacacttaccatcgggcaatgtcagctaattctagtgaagagtttgtaagatcaaaagaagctgcctctgctactcttgctattcagtcctatggaattggtgcagcatacctaggtggtctagtctttatggcttcatcagctccatcttttatcactcatattattactgaaaagcgtccgcttgacacaatcgctgtaggagcggtagcccgaatctttgagactgttggtctttctatgttcctgacctggtgcggtacccgtgtaaactggcccaactgccacacaggacaaattaaacagatgtaa

SEQ ID NO: 377 - DNA, 480 bp, Golovinomyces orontii
  source 1..480: mol_type = genomic DNA
atgtctacctcagatgaaactcaaacgattattgatcttgaaaatttatcggtaccgcaattaagtcaagttaaaaagcagctcgatgacgaactggagcatttgaccacttctttctctcagctacgtgccgctcaaacaaaatttcgtgattgttcacgctcgatcgaaaatggtgtcactccattagttaaggagaaaccaatactagtagctttgacaacctctctatatgtgcccggaacacttgctgatccagataatatcatcgtggatgtaggcactggatattatgtcgagaaaagtacaaaagatgccataaaattctacgagaaaagaagtgaagagattgcatcaaacttaaagatgttggaaggaatcttacaagggaaatcaaataatctgcggatcttagaagaaatcttacgcaaaaaactacttaaacccaaacccacgggtgaatctgcatctgctgcatga

SEQ ID NO: 378 - DNA, 441 bp, Golovinomyces orontii
  source 1..441: mol_type = genomic DNA
atgacagacgttgaaattgaagaaactggtcctacagagcctcaatcaagaaatattatctactgcggagtttgccatttacccccagagtactgtgaattcggtggcacagtgttggctgatcaaccgagaaaagatgccttgtctgcggcgacctcatctctttctagtacttataaacgcgtagagagaagcaagcggaagtttgtaacgatagtggccggccttgaagccttttcactagaaaacaaaaaattcgccactggttcctcggtcacaaaaactcctagcggaggcgaagaaatagtcgtccaaggcgacctcagtgaagagattgaggagtttatactcgaaaagtatccagtcataccaggagacaacatcgaactgattgaggatacgaagaaaaagagcgttggctccggggtcggtggtggatag

SEQ ID NO: 379 - DNA, 2325 bp, Golovinomyces orontii
  source 1..2325: mol_type = genomic DNA
atgggagcaactatcgccaaccaagatagaaattcagaggatactgcctcatcaggatcagccacatattctccacgaactgagcactacgaaaattctgacgatgatcatgatcatgatattgatgatgagttcgatgataataaggttgaatctgggaattatctattgaatttgaccaatccagttgaaagaaggttccgacgactagctttggctattgtcgtagtatttgttggagcatggtttgttgcacttatcatgttcttggggcaacatacatacttaagatcttcttcaacctcgcatgaatctctatcttcttccgtttattcaagagggagaaaggtgatgcttagtgaggttttggacgggaaatggcgaccccggaaacagaaaataaaagatggattacttctcaagcaagcttcccccgggaacgattatcttgtagttgaggacatcaaaagaggtagtaaagatgtcttaaacgcaatggcaactataaccttaatgaaaaaatcatatttccttaaagttcttataacaacagattatcaaaagaattggaggcactcattctatgccaagtattggatatttgacgttgagacgcaaactgcagaggctttggaccctgctcagccagacgaaagtatacaactagctagttggatttttacacgtaataataatctcatgcttcggaaactgtcttccccaactgttactcagatcacaaccgatggcgggacagatcttttttacggtgtaccagattgggtttatgaggaagaagtattctctgggaatagtgcaacgtggtgggcagaggacggaaaatttatcgcgtttctccgaacaaatgaatccatggttcccgaatttcctatagagtattttctgtccagaccaagtaagttgaagccgctacccggagaggagaactatccagaagttcgaagaataaagtatccaaaagccggcgcccctaatccaatggttgaccttttattttacgatattgataaggggacgtctttcaagttaaacctggcgattcttgtttgggcaggttccgttgggaaggcacttattcgtgagtcaaatagagagagtgatataatgagagtagtccttgtcgatgccctcagtaggacaagtaagacagttcggataaataacctacgggaactcgatggtggtgacccgctccttggccgacctgatcatggatacattgatacagttgtctataataactttaatcatcttggatactttacaccgctagacaatcctgaaccaattctacttacatctggagattgggagattgagaattctccatcagcagtagacttgaaaaacaacctaatttactttatagcaaccaaagaatcaccaattcaacgccacgtttacagtgttaggctaaacggtaccgaaatgaaacccctcacggatgtatcaatggagggttactatagcgcttccttttcaagtgggtctaatttcgctttgctcgattatgaaggcccaaatttccttggcagagatactgagtataatgaaactcttgaagataattcctcattagtaaatctaatttattcgacgataaacgttgatggcaaaggccatggatttagcgaggataaaaaataccctgttttatttcacctttacggtgggccaggatcacagacagtaaataagaaattcagctatattgttgttattgttgacggtcgtgggaccggatttattgggcgtaaagctagagccattgttcgagctaaagtttggtccaagagaaagtatgtcgatccatcgagaatagccatttggggatggtcatatggtggattcatgacactgaaaacacttgagcaagacgctgggaataccttttcttatggtatggctgtcgctcctgttaccgattggaaattttatgactctatttatactgaacggtatatgcaaacacctaaacacaaccctagtggttatgaaaattcgagtatcagcaacatgacagcacttcatcaaaacgtacgttttttgttaatgcacggcgcggcagacgataatgttcatctacaaaactccttaacattaattgacaaattagaccttgcaactgttgagaattatgattttcagattttcccagacagtgatcacgctatttattttcacaacgctaatcatgtcatctatcataagttaaacaattggattattaatgcattcaatggagaatggctcaaaacttcgaatcctgtacccaaaacaaaaatctcctcaaagtatttgtaa

SEQ ID NO: 380 - DNA, 1845 bp, Golovinomyces orontii
  source 1..1845: mol_type = genomic DNA
atgcatttgaatgagctttcagctgtgccgaaagcgcttcagggttccgattttaagttgattgagcctcaactcgctcgattagataaacatctgatactgcgcacttatatgctaggatactcactttccgatatcgattctcaaatatgggtttcgttacgcagcaacaaagccgctgtttcgtacttaaaacggaatctacttgtaaacttatgcagatggtacaaatttgtggaatcaacacacccagaaattcaggaagagacaaaagctcaagtggaaaaagaaagggcaaagcgtgtggcggcaagtaaggctggaggtagctatgctatggcacttcaagatactgataagggggtcgttacaaggttccctccagaaccctcgggatatcttcacatcggacatctgaaagccgccatgttaaatgattattttgcgcatgagttgtatcaaggaacacttctactaaggttcgacgatacaaatccctcaaaagaaaaacaggaatatcaggactcaattgttgaggatcttaagctcgcagggatcaagcctgacaagacaagctttactagcgattatcttggggatttgtacgagtactgtatccgtttgatcaaagagggtcatgcatatacagatgacacggatcaagagacgatgcgggatcagaggatgaaagggatcgccagtaagaatcgaaacaatagtgtcgagacaagtttggctctatttcaggagatgaaggtagcgtcagagattggcttgaagaattgcgttcgtgccaagatgagcgtcgataatccaaataaagctatgagagatcccgtgatctatcgctgtaacctgctgccacatcatcgaactggagaggcgtggaaaatctacccaacctatgacttcgcatgccctattgttgactcgatggaaggtgtgacacatgctttgagaacaactgaatacacagaccgtaatccccagtatcagtggtttcttgatactttaaaacttcgtcaggttcacgtctgggattttgctcgaatgaactttatccgaacagtcctatcgaaacgtaagttaacaaaattggtcgaatcaggagtggtttggggatgggatgatccacgtatgccaactatccgcggtgtgagaagacatggtatgactatttcggcattacgcgatttcatcctaaagcagggacctagtcgaaacattgttgttatggactggaccttattttgggcttcaaataaaaaagtggttgatacatttgccgcgagacatacagccgttaaaattcaggactctgtaaaggcaaaaataactaatcctaaagttcctaagaacccctcgttaggaatgaaaaaagttgccttcagttctagtataattcttgatcaggaggatgttgcactcatgaaagttgatgaagagattactctcatggcttggggtaatgcaattgtccgaaaagttaatggctctaagcctatcaccgatatcgaactggaattgaatcttaaaggtgacgttagaagtaccgagaaaaaagttacgtggttagctactgaacaagatcttgtcatagcagagacatggaaatttgatcatctctttacaaaagataagcttgaagaggatgataactgggaagactttgttaataaggattcagctatcatgactcaacaattatgtgatctcaacgcaagaaatctcaaagtcgatgatattatacagctggaacgaaaaggatacttccgagttgataaatctgcagataatgggggaaatctggttctctttgagattcctactgggaaaacaaaatag

SEQ ID NO: 381 - DNA, 4107 bp, Golovinomyces orontii
  source 1..4107: mol_type = genomic DNA
atgggcaagaaaggatcgaaacatgagagtgctaagtcatcgagcggaggtgcagcaaaaaagaagcaaatctctgaagatttacctgctgacaattatatcatcttctccaattcggacaaagaaacgaaacaaaagaatcaaaattatgccgttggctcggcgaatcaaggctcatcctcattattaggtgaagcatctaaaagagttgatgtcaaaaagctcgttggaggtgcttcatggaccggtaaactacctgtgaatatgctttcggaacattgtcaaaagcagaaatgggaaaagccagaatataccatgtccaagaccggggaaggttattcttccatggttatcctgaaggcgagaaatccaaagactaaggagcttgaagctcttccgccttttaagcattttgcagctgcatatggtctgtttagagtctgcagtatgcgaaacattcacatgatgatgcctcctggctatcgaattctatggaaggatcaatttcagacacttaaggatgaagacataagacaaggacgacagtggatgtaccgagcagacccgtttgtcgttttacaggagcgcaatgaagtcagagctctagcagataagaaacgtgcagaacaagaaaagtcaaaagagaatgcagtaaaagctattgtcgcgcgaaatacgtctctggaaactttcagcactaatggacttgctcttcgtgacaatggaactcgtggccatcctaggatctggcaaggggtacctagaatagaaatgggtaaacgaacccgggctcgaatcgaaaatttagttcaaaaatacgccacatggaatcttcatggggtcgagctatcaaagtcacatcaaaactcaatcatcaccgaactacaaaaacttggatttcgttcgagtcatattgaagaagcagttcaagaatgcaaggatcaagaggaaactctcgagtggcttcttatccatgttcctgaagatgatttgcctcaatgggctctgcccgaaggatacgaggctggaatctccatggttagtagcgacttgaaaagagaaggtgtcataaagagattagcagaagctggttactccgtagatcactgcaaacaacaatttgatcaatttttagatgaaggcaaggctgcggaagctttgcaacaaatactcgtatcaaatacacagaatttaaatattccggagtcttcaactcctggggatactgaatcgtcttctgagatgaaatgggaagaggagatgtccagtttgcatgctgtattcggtgatcgatttacaagacttggaaaaaatctttgtcgtatctcgctcgagcctgtcgataattcatctggaattaaatcggtgttacagtttagaaaatccttaaactatcctgccaagccaccagtagtctcaattcacgtcgatcttcctgcatacatacgtttaagtataattaaacagacactcaattatatgatgaataatctgttagaggaacaaatgctcttctttactattgactgggtcgaacaaaatataattaaaattatagaaagaccaggaaaacttcgagaggtatctaacgcggcttctacagcctctaccagaagtgatagtctgttaacaaatattaaacggcaacaaataattaagctcccaaagtttttgggaaaagctccgaacctacaaagcaaacacgactgggtacagcgtcaggcagctccaaatctaaaagctcggctcgaacaaaggaagaaactgcctgcatggaaaataaaagaagctataattgatactatatcatcacaccagataagtattatctcaggggaaactgggtcaggtaaatctactcaatgtgctcagtttcttctcgatgatatgtatgagaaatgtctaggcgaatctatccgaatcatttgcacccaacctcggcgtatatctgcaatgagccttgcagatcgtgtaagtgatgaaagatgttcagctgttggtcaggaagtgggttacatcattagaggagaatctaagacaagtcaaagaacgaaaataacatttgtcaccgctggtgtacttttgaggagattgcagacttccgggggatgtatcgatgatatagctgcaaacatcgctgatataactcacattatgattgatgaagttcacgaacgaaatttagataccgattttttactttgtctcttacgagatgtactatcgagacggaaagatcttaaactaatcctcatgagtgccacacttgatgccggaatatttgaggaatatttccggaaatttggcatagttggtctagttgaaatcagtgggagaacatatcccattgatgattattatctggatgatattattcgaatgacaagcttcaattttgggaatagagattttcaacgggatggtaatgataatctggataatatagaacaggtcaaaatcgcagcagcagttcaggagttgcctatgcggataaattatgatttaatttctaaattggtaagaaaaattgatgaaaatttaacagaattgaagcaaaactacggaatactgatctttatgcctggagtttctgaaatcaaccgcgtgttagattgcctacagtccataccgaatctctatgtactaccactctacgcctctcttcaatccacagagcaacgaaaggtctttcctaatgcgccacttggcaagagaaaagttatagtctcaacaaatgtcgccgagacgtctatcacaattgacgacattgtagctgtaattgattcgggacgtgtcaaagaaataagttatgatccgcagcataaaataagaaagctcgaagaatcgtgggcctctcgggccgcatgtaaacagagacgtggtcgagctggccgtgttcaggcaggaaagtgttacaagctttttactagaaacacagagattaaaaagatggcagagagaccagaaccagaaatgagacgcgttcctcttgaacaactttgtctctcggttcgtgccatgggtatcacagaagtaaataaatttcttgctagtgccttgacgccacctgactgtattgccgttgaagacgctatgaatttgcttagcaggattggagcacttgatggcaatcaactcactgcattaggtcaccatttgtcagtaattccaactgatttaagatgtggaaagttaatgctgtatggagcgatttttggctgtctagatgcatgtgtcactattgctgccattctcacggccaagtcaccattcatttcaccacccaaagagaagaaagagaatctatcagctatcagatctcaattcgcacaaaatcatggtgacctgattggcgatcttcgagcttttgagaagtggacagagatttcaaacaataagagttatcgacaagaaaaagtgcaaaattggtgttataacaacttcctctcttatcaaaatctgaatgagatttcatcaaataaagcttattttcttgcttcattatatgaactctccttcataccttcctcttccaacaagatcatcactggttctttgaatagaaataattctaatacttccctgattcgatgtctctgtgcgggtgcattcaacccgcagatagtgcgcatctcttttcctgagaaaaagttcgcaccttccatttcgggtgctatcgcccttgatccagaagcaagaacgattaaatactttaatgaagaaaccaatcgagttttcatccatcctagctcgacaatgttcaatatacaatcatttcctgggaacagtaatttcttggcttattttaatatactagccatcagcaaagtttttattcgtgaattaactcctttcaattcttacacagctctccttttttgtgggcccattactctagatacttttggtcgagggataattgtcgacaactggcttcgcctaaaaggctgggcaagaattggcgttctcgtaaataggctacgctgtatgctggataatcttttggccaaaaagattgatgatcccgagttgagttttacaacttctgatagtgaacttattgatattgtcttaagactgattgagcttgatggcttagaccattaa

SEQ ID NO: 382 - DNA, 2997 bp, Golovinomyces orontii
  source 1..2997: mol_type = genomic DNA
atgtttcagcgacttaaaggtgctattgattctcgcatcgctgaagaacaggctcgccagaaggccttggctagctcaccattagcccgatcgctatcgtcattgggtcgggcagaaccaagggattactctcataatccaaacaaagaaaagcgacaagagaacggagtcgatgccgatggggcagatccttctgaatttgaaaaggccttcataattgaagatgaggaagagatgtctgcgaaagagttacccgaaacaatgccggatcgaagcaccaataccaaagaaatcaacacaaaccgagcagttgaagaaaatacaccgggagataatatagatccatcgactacctcgcaacacccaagattatctacagaggttagggcgaagttacggaaactagaacgacttgaaacaaaatatcaagagcttttacgttcctatcgcgttgcacacgctcgagctatctcagttgaagttttcgaaaaacagctcaaagaatatactcctctctctactatatcagatccggacgcttttgttgagtatttgaaccaacttaaactaaaaagcgatataattatagatgaattcaaacgagtttccgctgaaagagacgaatacaagaagaaatatgacgaatcccttactaatacgttaaaacttgatcaagaacttgctgcacttaagagctccactgctaaaaccagagctgagctggcagtgtatgtatccaaaaccgtttccgaggcaacgtccccagctgagcgtcctgctaactatagctttgacaccaatccacaaagtggcaaagagattgaagcgggtaacaaaaatcagcaggaaccttcttcacttgaccatgaagtgccttcccttcagacagagattaaacagaaaacttctcaagtggaagatctcaagtctacagtttcagagttagaaaataaaattagtatctccgagagaaaaagttccggtttaaatgaaagcttgattaaagctatttgcgaactagaagaagttaaagtgaatatgaaaaaagaagaatttaatcaagagaaaataaatgcgcaagcagaggagattcatatcttgaaaaataagcttgaggccacagaaatccaagtctcaattcttaagagagaactagaaagtaagcagagagaatgcgaagaaagacttcaggtcctcaaggacgattttgcgaagcgtgagcaggactcagctatagctctgaagaatttaacccagataaatgaggaggcagaagttcgttgcgcaaccttggaacagaatgtagatacattaatggagacgaaggaaaacaacgtcaagttaacaaatagcttggcaaatgataccacgaaattggccaacatacggaaaattagccaagatctttctggtctagacgaacagatgagacacaggattattaataatgagggccctaatacaacaactgtcgtggaatcgaataagaaaaagggaaggaagaagaaaaagcctcttccaattgttaaaaataatatcacagaactctcgaccaaagctacaaaaattgctagtttagaatcggaaattaatgaactaaaattattaatcaaggatcgagacaacagattagaaaaagatctcctagaagaaattgagaatatgcaagaaaacctcattaacattggccaggagcatgtggaggccaaagagaagattaaggaattacttgaagagaggagaaaacttcatgaaaaaattagtaatcttgagaaatctgagaatacacagaatacaaatcacgatgaacttaagctatattcatcaacactcgaggcagatcttgacctaactgacttgcgagaattacttcagaagatgcagccagaattaacgaagcttcgtgctgaatattctgaaattaaaagtaccagagatgagctaacatctcgtatttcagagttaaaacgccttgagacccagattgcagtttttaggaagcaagctactgattcacaatctgaaatccgcgctttacatgagaagattacgattgagaacaacgctcgtctacgtgctgaagatcagcaacgttcagaagctgagaagattaaatatgcagctgcaagtgaaaaatcagctttagaactggttaaatcgcaggaggaagctactaacttacgaaagcaatcaaaaaagcttcgagaagagtctgatcttcgaggatcgaaatatgaaaatgctcaggcactattaggaagtatgaaggatcagcttagagaagccgaatctcaatatgaatctctttctgaggagctatctgaaggcgaaactatgcgtcgccttctcgccggagttgatgatcgagcagaggcaaaagtaccggcgattgaggaacttgatcgcgcccgtgatgaggcctctaccgctagccgacgccgagcgagagaatctgatgaggtcaagaatcgacttcgagatctcgagcaaaacctacaaaattgtatttccgagaaagataaattagagctcactgaaaatatatggaaatctcagtataatgatctcgaaatatcatccagtaacttaacgaaggaggtccaagatatcagagctgcaatgaatcagctgcgtaaagcacttgatgggagtgagaaggctgtgaagctggctgaaaagcaaaagcatgaattgaggggagctcttgatactaccaatcagctctacgaatcattacaaaaagaatacaagattcttcacgtaaaactggccaagctaaatgaaccaagtgaaaggcgaagtttggacagcaaaagtggcagtcaatctaggtatgatgtcgaggattttgcgtacttgaagactataatgttacaatttttggaacagaaagaccgtaatgtgcaagaaattctggttaaaactgtgctcaagcagttattgaagttcgatgaaaaagagcaagaacggtggattgcagtaatttcaaagaattaa

SEQ ID NO: 383 - DNA, 1650 bp, Golovinomyces orontii
  source 1..1650: mol_type = genomic DNA
atggcgaaagtaatacgaagtgtcaagaacgtcaccaaaggatactcgaacgtacaagtaaaagtgcggaatgcgacaagcaatgatccatggggtccaacagggtcagagatgagtcaaatcgctcagatgacatttaattcctcaaacgatttttacgaaattatggatatgctggataagagattgaacgacaaaggaaagaattggagacatgttttaaaagccctcaaagttctggactactgtttgcatgaaggctcagagattgtagtcacttgggcgcacaagaatatatacatcatcaagactttgagagaatttcaatatgttgatgaagaaggtcgggatgttggccaaaatgtgcgtgtctctgccaaagagttgacatctttaattcttgacgatgaaaggttacgaagtgaacgtagtgataggcgaaattggaaatccagggtcaccggaatcgaagaatttggtccctcgcaagatgaatcgacgagaagaaatagaccacagcgggcgcagcgagctgatgaagaagatgctgaatataagttggcaattgaagcgagtaaatttcaaggagaggaagatcgcagaagaagacagagtcaaagagcgtctcctgatgacgaagacctcgcaaaagcaattaaattaagtaaagaggaagaagaacagcgacggagggagcttgaggaacaaaacgcctcgtcattatttgatgatgatcccatccaagttccccaggctacgggattcaatcaaggataccagcaacagactcaagtagattgggctggaaatcctattgatccaaatctaccacaacaaacaggatatatgacaaatatgtatacaggttttagtcgtcaaacaacagattttcaacaagacccatctatctatcagaatgggtaccaaaatgtatctccttctcagccatctggaattgatccatttggacagcaacaatttcagccgcagttaacaagttacaacccgtatgctcaacataatgcgagccttttcgtgccacagcaaacacaaccacaacaacagcagctagagccaataattcctgcaggtacaaataatccttgggcaactaacagtaagaacaccgatcatactatgcttaaacctatgccaactggctctaataatccctttgcatcttcttttggtcgatctcagtcagccactcccccatcaaagcctaccctctccgcgttgcaagagcaacaaactacatcatttggaaataaatcctcgttgaatccaatacaatcattttcctcgtctccaatgccgcttccacccccaagacaagatacgtttggaaatacgggagaaatgcgtattcctgcccagcatacagcgcctggaacttttgtcaacagttctggggcagggctggctcgtctaacggcatctaaaacaggtaacaatcctttcctacaatctcagtatacgggtattccacaaacaaaatacgaaggcaatttatctagtgggtttggaggtggacaaccccaggtaccaactctcccaggaccggctggaatgtctaccggttacggaagtcaatcatcaatctttatggatcgagagcacaacatgagaatggcggtcatggagacttaa

SEQ ID NO: 384 - DNA, 1626 bp, Golovinomyces orontii
  source 1..1626: mol_type = genomic DNA
atggctttgggacaattagctaaagaaataaatttattcaatacttcagcttctcgaacttttagaacattgcatagaaaacgactcgaacccaagatatatgacttctcaaagcatcagcggacattatcatctgcaatagaccacagccagcggcagactaaacacaatgctacgtctaaaatacgactcctgagaagttctcacaaagccaaatacaaatggttttttttcccttttggtgtaggagtctgcgtttttgggctttctcaaatgtggagaaatgacgaaagaaaaaagaagattgacgatagtgagtttcaaaactcttccaacactctcagtgtcagagatcaggaatttttacaaagtaaaagagccaaagttcgaccagatggaccatggcaagtccaagttatgtcgactcttccactgaaagctatttctagattgtggggaaagtttaatgaacttgaaataccttattatttacgagtgccaggctttaagctgtattcatatatattcggggttaatttatcagagatatctgaacccgatcttcatgcatatcccaatcttgcttcgttcttttatcgagcgctgaagcctgggctaagaccattggattcaaacccaaattccctgttgtctcctgcagatggtagaatacttcaatttggattaatagaggatggtgacgttgagcaagtgaaaggtgtgacatacagtctcgatgctctacttggtggtactacaaaacaaactgcgatagccaaaaactcagaactctcagattctatctcatcgaaaccaaaaaattttgaggcttttaaatcagacttggaagctgatcaaaatgttattaaacaagatgaagagtttgcgagagtaaatggcatttcctacactttgtcgagtctattcaagggtcccgagaatcagcctaaaaaaacgttgaggatgcttccacgattccaaaggcagccagcgaggcagaagttcgcgcagatcttgccttgggagaaacttcgtggtattcaaagctcatgtcgagaaatcgatctaatccgactgctctctattacattgttgtttatcttgcgcccggtgattatcatcgctttcactctccctgtgcatgggtgtgtatctccctatctccaaagtatactacctgggctcttcacgcttaacgaacgcgtagtcctcttaggtcgctggcgttggggcttcttctcctatatacctgtcggtgccactaacgttggctctataaaaattaactttgatagggagttgcgaacaaactccctagtgacagatactgcagcagatgaagcagccaagcgcggtgaaccgtactgtggttattcggaagccacatacgaagccgcaagtctcatcttgggcggatattcactgcgtcgaggcgaagaaatgggtggctttcaattgggaagcaccattgtattagtatttgaggcagcaaaaggtcagaggccgagtttagacgaaggttggatgggagaaaagtccaagagagtaggtggctggaaatgggcagttgagcgtggacaaaaggttaaaatgggacaagctctaggatgggtggatcagtcatga

SEQ ID NO: 385 - DNA, 1323 bp, Golovinomyces orontii
  source 1..1323: mol_type = genomic DNA
atggatagtcctggctttatgcttcacaactatctttccgattataagaataacaatgccgccaaacgaactcatcatctaaggcacaaaagctgtgagcggaaaaattctcatgattgtgctgaagttcaccaaagagtatcaaccaagaatacgattgcttcaggtctccaacgttccattagtctaagtcgcaaaaaatcagttgtacaagaccatacatcccgaccatttatctcaaaatatggacgccggtatcttcgagatgaaactttaccatatcctcttccgactgacatagccgagcttcatcgccagaaattacgaactatgcttttctgtgaagtattcaatggcccattgtgctcaccatcttttaaaacgaaaccacctctttctgttctagaggtagcgtgtgggaccgggtactggagtgaaatatgccatcgtcacttttataaccagggacataagtcgatctctttcactggtatcgatatagccccaattgatatacccgatgaaactttaagcaaaaacgaaatgaattggcgcttcatacagcatgatttacgacaactaccgcttcctttcaaagacgaggaattttgcattgtgatgatcaaagatcttagtatggtaactccaactacggatctagaacagttgttaatggacgaatacttgcgaattttaaagcctggaggctcactcgagatttgggatggagatcactcattaaggatgcttctaccacgccccagagtagatggggacgatggcaaaattttttttcatattggacccatctgcaaaagcccgacaggaatttatttattaacgcagcaaaccttcttcgcagcgcctaaaaatccatatttgaacgattacaatacatgggtctcaaaagcgcttggactacgcaagctaacttctatgccttgtactactattttacctttactatttcaagaagctgaggtccttcacgaaatcgatagtcgtcgactagctatacctctcggaaaagtgcgatgggaaactgaaagtacaaatgtagatccttccaagggtaaggaaaaggtatcagagagtgatctcttacctgaaactgagacggctttaagacgcacggcacttatgatagtcattcaaacaattgaaagtcttgaaccgttacttcgtgaggctagcggaaaactagaggaagagtgggattcgtggatggaaaatatgttaagcgatttgctgcaaggcaacggtgcctcctggggcgaatgtcttgaggttggcgcatggtgggccaaaaaaaagaagcgttaa

SEQ ID NO: 386 - DNA, 912 bp, Golovinomyces orontii
  source 1..912: mol_type = genomic DNA
atggctcaatttgtcccacgggcaatcttcccttcacagttagatcttccgcgctcttatttcctcggtcaccatgcttcgggtctagctgaaatgaaaacaatgcttacccaaatccaacttataatcgaatgtcgagattatcgtgttccgcttacttctcgaaatccattgtttgaacaatcacttattggaagggagcgattagttgtatatactaaaaaggatctcggcagtgcagaaagacgtattgacagaattagagaaagtattattcgtgattggcatcgacctcagccaaccttctttatagactatcgatccaaaaaagacatcaaaaacctattggagtttttcagagaatatgcacatcgacggcaatcagtactatcctcacgaatccttgtcgttggaatgcctaacgttggaaagtcctctcttttgaattcgttacctgcagcgacaggtgctcagccagggattaccagaaagattgcaagtgcagttagaatagtagagcgcgatcgagaacagaactttgaaggcgtttatcttgtcgatacaccaggtgtttttataccatatgtttcagacgcggagtcaatgttaaaattagcgttggtggggagtgttaaggatacgattatttcaccggtcactctctgtgattatctactctttaagttgaatcaacaacctggaggggagaggctataccaagattataatcctcccacaaacaatgtggttgaattcctagaggcagtttgtcggaagacgggtaggctgaagaaaggggatattccggatattgatgccgccgcattgtggataattcaaagatggaggcagggaaatatgggtagattcgttcttgatcaaatagaagaaagtggcttggagaaaaaatga

SEQ ID NO: 387 - DNA, 279 bp, Golovinomyces orontii
  source 1..279: mol_type = genomic DNA
atgccgcgcgagacctctgacatcaaacaatttatcgagatatgcaggcgaaaagatgcttcttctgcccgtataaaacgaaacaaaaaatcatctcagacgaagtttaaggttcgctgccagagatacttgtacacacttgtactcaaagattcggaaaaagttgagaaattaaagcaatcactaccaccaaactatcctgctaaattttattattccagatcttgttattgccgatacccaaagaaaaatgcaaaagggaaacgaaccgcacagtaa

SEQ ID NO: 388 - DNA, 3282 bp, Golovinomyces orontii
  source 1..3282: mol_type = genomic DNA
atgaagatttattcattgctgagtccatcagcttcatctgccattcaacttggaagcgctcttactttcaaaaaagccccagccgcgaatcttaatctaggaaacttaggtcgtacagcatttactggtgacttcacagggatttctttttacgaatacgaaggacccagcgagaatactcttgggaagaatggaagtcagtcgctccttcagagaatgcccgatgggagatttgcgaatgtggcatcgtctgatgcaggtattcaggcaatatgctttttaaaagcaaacaatggtatatcttacagtgtaatcgtcggcggtgatttcacagatttaggtggcgtcgaatctcctggaattgcgatattcaatcctgaaacttcagtcgtaaagccaattattggattatctggtcaggtttcggcattgtactgtgatgagtctacaaaaacggtctacgctgggggtagtttcaaaactgcaaactcaatgaatgcagttcagttaatagatgacggtggttttcaggacttaccctttgagggctttaatggacctgtaaactctataacgaaagctcccaatggaaaaattatctttggtggctcttttacagggcttggaaatacaacggtcggactaaatctacctgatcagattgtcataaatctttctgaagcgaaaataacatcaggctcctcatcgccagtccctgggttaaatgacccctttaacattgtttgcaagaatactgggagagatggattaggagatacatggcttctaactgataatactcctggattctggagagctgattttggttacaattttagacctaccagactgaggctatggaacacgcatcttaatggtcgaggaagcagaatattccgctacacagcatttcccataaacggtataatgaatctcacttatattgatccaatcaccaaacagactaatcactgcacttcggaatgtccattaagcgatgatactaatattttatatcaggactttcattttgttaatgtcattaatatatcgggttggtacggtaatggaggcgggttctctggcatagagctcactcacgatgatatagactcctacgcagtcaacgcatttaatgaacctgcttgcacaaataccgaaactatatccactgtgtcaatgactggaccatggtctgtttcaccatcagctcagagttcgtcagaatatttatcaatctcttctacagccgcagaatcagcttctgtcgttttcttacctaatatccgacaacctgggaattattctattaacatttacactcctggccgtatcaacataacaggtgtcatgagtaaacaaggaaataatggggttagcttctccacagaaatatttcaaactaataattacgataaatacgatcagatctattacgggtatattgatgctattagcagctccttcgaccatctattatcgcaatttaaccgttgtcgctcagcgagttggttttactcttgtctcgccagcgatggcttaaatggcctttttgagtatgacccaaagcaattagacacagctcaagtcaacataaataatatttctccttttaattctattggaaaaaatcttccatctgaagctgaagtggctgttctcaaaacattcgacgaaacgacctatataggtgggggtaatttctcaaatttagctctcggtggaaattcaaacctctcaaacatcgctacttatgatatactaacaaacatttggagttcaattggggctggtgtcaatgatgctgttctagagatagtacctctacagttgaacatcactaaaaacaaaccggagatcactattgcactaaccggtaaatttacagaagtattaggcttcggtggaaatccatcctttattacagatggatttgctatttgggtcccgtcagcaaacaactggcttcaaaatctagacatcccgaaagttaaaattgatgggactctcaccaccgcaatagatctacctgatggagtaactttatatgctggatctgttacatcatcacagcttagtgccgttgatgtggctgagataaatagttccggatcctcactccagtctttcccgataaaaattcaacactcaataataccacaatttattatgcggccaacaaaaatttcagtttctagcatctcaaattcaactgaggttgtcgcaggactatttcatatccacaactcaaacactattgtcatattggggggtcatttctctacaacaggttcaaatggatctgaagtgacaaatggaaatgcagtaagtggaattggaccgtctctctctagtgattcgaaaatactagcaatggaagttcataaagatactttatttgccggagggtctctaacgggaatcgtgaacggtgcaagcacaagaggcctaatttcctataaccttgacaatcacgttttgacattcagccaccatcattggacggagacacaattaaccgatgaagtgtatgttggtggaagcttcacgtcagctggatcacttagctgcccggctgtctgccagtattctaccactatttcgcactggaatcggataggaaatggattagcaggtgttgccaataaattactttgggctaaccctaacttactaattgttggtggaaacctgacactaaatgatgctacggtcacattagtaacatataatactaaatccctgactgctaatagcgatgcttctcaaatttgggtttcaggttacgccttaaatggtaccgcctatttgatgaaatttgatggtaaatcgtggactccgatcagtcatcttttgggacctggtactctggtgaaaggacttcaggttctcggaacaatcagtaaccatgcgtcatctgcgctagtttcctctggatcgattctcctggtcacggggttgatcaagctcccggaaatcggattcgtttctgcagcattattcaacggaagttcatttcaaccatacatactaacaagctcatcagatggccctggtagtttaacccagttctttgctgaaaaagaagtgacttttcagttgaagctaatcagtatagatggtaaccttgcaagaggattcgttgtccttatttctctggcgatcgccttaggccttattatgataattcttgtcgcaggcttcttgttgaacgcttacggaaaaaagaagaaggatactcgcccgctcccaccagcaactatgagcgaggcataccaatag

SEQ ID NO: 389 - DNA, 1434 bp, Golovinomyces orontii
  source 1..1434: mol_type = genomic DNA
atggacggcgttctctctaaactcctttcgtttccgccccacccaccgcctccaattcctctttcagatgctcagtatgatgaaggaattaaggagctgatagaggtagtcagaagactttcgaaaccgatactattacaaaaaactgctgggggtgaagacaccttagatgtcataaatccagcaataaacactgtaccatacacatttatccttctcgctagtatttcagtatgttcggatggaactgagacaaatacaagtaaaatatgggacaaaattaccgcatatctaaccctctttgacccaagacaaatcagatatcttggctcggaatttacagctatcatcgatgcagctgcaagttttgctcaatcgactaatcggcctggtctagcattagtccctattagagacgctctactacgtttagatccaagtggagctgtacttacatcaaatcatctacgcctcgcaagactagccttggagtctcgggattatgacgctcttggtccatttctggacaacattgttttgtacgttccagatagcaccaaaattcccaaaccaaagcatttatgcgctatgaacctaaatcccgttacatatattacatctggctctggtctcacagcctccatgaactacatagatgtactagaatattttatctgttgtggaattgcctgccttgggattaggaaatggaaaagtgcattgaggcattttgaatgtgcaatcacatatccaaccagagatgcggttagcaagccgatggtggaagcgtataagaaatgggttttgactggactcattacttacggaaaagcacagacaatgcccaaatcaacgaacagtgaagtagcgagggtataccattcactcgctagacaatacgatagcctagcctccgtctttgagaatggaaagcaaaatgaaaaaaaatggataactgatagtaactctgcgctagtcactgagatccgtaatcttgccaacatttatcacaaaatatctatcgttgaaatccacaaccaaaccacaagtgctgagataggcggtaatcagctttccgtcagtaacacggaaagactagtgttgaaaatgatcagcgacgaagaactttatgctacactaagcgccgctcctcctagtccatcaattttgaccttttggcccgctggaccaatcttgacggaaagtcagatacggaaagaactttctgcaaccaaatctagaattaagtacatatctcaagagatcaagatgactgatcgaaatttgaatcatgatagagattatattaaatatttgcaaatgcaaaaaaaagcaagccaccagggcaatagcgataatgaaaaccaagaggtcgagactgttatgaattggaatgatattgttgaggacgaggatattatgggtgtctactga

SEQ ID NO: 390 - DNA, 588 bp, Golovinomyces orontii
  source 1..588: mol_type = genomic DNA
atggcaggtggtcacatgaaatatcggcatcttgggcgtaaatcatcacatagacaagccttacttcgaaatcttgttacctcactatttacgcatgaatcaatatccaccacatggccaaaagccaaagaagcgcaaagattggcggaaaaaatgataactctgggaaaaaaaatacggaagcgagtaggaacaaagcatttagcttctttttcgtacacaccacatgatatcatacctaagctctttggacctctcagagagcgttatgcaaacagacctggaggttatacgcgagtactgcgcatcgagccattaaaagaggaccaggctccatctgccatcttggagttggttgatggcccgaaagatattcgatttgcattaacagctaagactgtggcacgtctgagagaggagggtaaatcaattaatgagatgacagggatttaccgcaagaaagtcacacgttacaggccgaatggagagctggagtttgaaaagatggtcgataagctaggcgaattagaattagtaccaaggagtaatgctgataacaaggaacgaagatggggcggtcaagtttag

SEQ ID NO: 391 - DNA, 1689 bp, Golovinomyces orontii
  source 1..1689: mol_type = genomic DNA
atgacgttaaggggagcttcgaggtcgggtcgaggtagaggtcgaggtcgtggtcatcgtgaatctggtacaggaagaggaagaggaaagtcaaagtttgaggactcgaacatagctattccgcagccaaaagcaagggtagagtctagttctgaagataatcccgatgatattacggaattagaagataagttgagtagcgatgacgaagaagaggaatcattatccacgagtaaatcttattcaagactgattcaaaagtttgcctctgaaccccatatcgaaaatttggatgagattgacgaagacaatcagtgtgaagataagaacgtatctgatcctttcacaagtcactttgacgattcgaactgtctaaagataaaatctgttacagagacagaatgggtgacgaaaaaattggtaatatcagaggagtacagggctatcgtgactgttctcaagaatgagtccaactcatatcaatttcggccagtagctggcgctggggagttggttttgaaaaagagacttttagatacattctcaaaacaaagatcgaacgtattattttgtggcagaactcctttaaattcagagatactccggcgcttagtctgcctgcattctgtaaatcatttactgaaggttcgagatcgtattataaaaaataataccaagctcgctcgagatgagagcagctcagaattggacttacgtgatcaaggattcactcgtcctaaggtactttttcttcttccgacccgagagtcgtgtgtacgaatcgttaagatgattctttctctatgcgaaccggagcagcaagagaatcgaaaacgttttgatgattattacgtggaaaatgttgaggattctttggagaacaagtctgatgactttcgtgaactatttggggggaataacgacgacttgttccgactcggcttgaaattcactagaaaaacgatgaagtttttttctcaattttacaactcggatattattttggcaagtcccctcggacttcgaatggctcttgagggcaaggacggtaaaaacaacgattttgacttcctcagttcaattgaattggtcataattgagcaggccgatgcattgttaatgcagaattgggaacatattgaatatatcttcgatcacatgaatttgcaaccgaaagaaactcacgggtgcgactttagtcgagtcaggagttggtacttagacaataatgcaaatgtcagatttacatactttaccactgctataatgtcatctttgactcgtcattctaaagaaagtaatggattactcatacttatcccctcctatctagattttgtgagggttagaaattacatattaatggctcaagccacggcaaacttgtcattcggtagtatatccgaatatagctctgttaaagaagttgcaagggcccgttctcatttttacagcggacggcacaatgttctcatttatacggaaagggcacatcattatcggaggtatcttatgtacggattacctgaaaatccaatattttataaagaaattgttggaggctttcttggtaggagtgtacaggaaggccagttaatgcctggagagggttctgtgagggtaatatactcaaaatgggatgccctcaagcttgaaagaattgttggtttggacgagtcagaagtatga

SEQ ID NO: 392 - DNA, 438 bp, Golovinomyces orontii
  source 1..438: mol_type = genomic DNA
atgacgactccctcttcatcatcacctgtctctcataatcgcctcaaacaaattaccaacgacgcatgtcacctggctttgggcgaggctgaatattatgaccattccaagacggagtcatggaataccaccatcattaattctatccttcgagctctaatttccgaatcttcgagcacgcccggcggaacacctcccttcaaattcactgttaatagtacaatcatacaacatttagttcccacatcagtaatccagcggactaaagattcagcaattggaactgacggaaggccacatgttggaaggagaggtatgcatagtgctactggagcttactggaatgaaaagactgatggaatgtggagtttcaaatacgatggaggcgataggagagggttagacgtggttatcagtatcgtgtggattgcattataa

SEQ ID NO: 393 - DNA, 636 bp, Golovinomyces orontii
  source 1..636: mol_type = genomic DNA
atgagaagaattctaacctttctttcatggattgccctgctcctacctgttcaatctctttattttttcgctgatgccaataaaccgaaatgtttttacgaagagctctccaaagggacactggtagtaggacattacacggttgaagaatatgacaatcaatctaaaagctggactaaaaatggacttactaaccacatcacggtagatgaagtgtttgataatgatcatcgtcgctttatgttttccgcctctgaatatggcgaacatcgtatctgcttcaccatcagtgccaattccggtagtaaagactggctctcgacttcaaaaacacatggagccctgaaagttacgcttgatatctccgtcggcgattctaccaaaagtgacgcctcagataaagggaagatattacacatagtccaacgggtgaaagaccttaatagcaggatgagtgacatccgccgtgaacagatctggcagagagaaagggaggaagaattcagagaccagagtgagagcacaaacgcaagggttgtgagatgggccttgattcaattagtagtcttaggcattacatgtacatggcaactcagccatctacgtagtttcttcatcaaacaaaaacttacatag

SEQ ID NO: 394 - DNA, 3522 bp, Golovinomyces orontii
  source 1..3522: mol_type = genomic DNA
atggtctcccaaattcctactccatcggaccgtcccctgaatagcagatcaaaaactacaaacgagaacacttgggcggaaaagactccaggtttgtcgaagaatgatgtcgcagcgtggaaggagaggacagctaagatcttggtcttaaagactatgtatcacttgggcgaatgcttaggtaaaggagcttttggttccgtttacaaagcttttaattggagaaccggtgaggccgtagcagtaaagcaaattaggcttggtgacctgccgaaaagcgaattgcgaatgattgaggccgagatagatcttctaaagaacttaaatcatgacaatattgtcaaatatcttggctttgttaagtcctccgatcgtttaaacatcattttagagtactgcgaaaacgggtcattgcactcgatatgcaaaaactatggaaagttccccgaaaatcttgttggtgtttacatggggcaaattctgcttgggctgcagtacctccatgatcaaggtgtaattcatcgggatattaaaggtgcaaacatactcactacaaaagatggtaaggtaaaacttgccgatttcggagtttcaactagcactctagccggagcagataaagaggcccaggttgtaggtactccatattggatggccccagagattatccagctatctggtgcaacaacagcttcagatatctggagcctaggatgtacagttattgaattacttgagggaaaaccaccttattataaacttgctcctatgccagctctctttgctattgtcaatgatgatcacccccctttacccgaaggagtatctccagcagcgcgagattttctaattcaatgctttcaaaaagaccctaacctaagagtttctgcaagaaagctccttaaacacgcgtggatagtgggctcaaaaagaatagatgctccggtcacgaagactctggcaaacttcagcgaagcagtggaagaagtcaaacaatggaatgaagctctaaagtctccaaccggcgcaggttcatgtaaagttccaaatagatcaacaaacactagcgcggtgcctaataggaggtacattcctcctctaagaaatattcaaaatgagcaaagagtattgggaatcattcctcctgctaaaggactacttgaactagccaaaacaaaacacaattctgatgctttccgttcacccgaaagtaaagctgatgataactgggacgatgattttgcatcttctatttctccaaataattttgaaggaaagttgtccactgatcgcttaaaggcctttgcatcttttgagctagcctctaatgaaaacgataattgggatcacaactttgagggaaatctagttaacttaaaaagccctcaaagatacgaaacacttgaatcgcacgagttagaaacgattcgaccatatcaagttcagcctacaacagcttctcagccaaagtctactaccgttataaaaattctgcaaatttgcccttttctgacgatggatctcgaagcatatcccagtcctcaaaaagatagtaaattgacatttttaactaaaacatccaatatttttggagacaactccatggatgattatgctgaaatttctattgagaatgattaccatttaaacaagcggaaaaataccattaaggttaatagtatctcattaataaagacaggaagaacaaaaacaatgcatcgagctagatccgctgttcaaattaaaaagttcgcagaggatgaagatgatgaagatttctctgatatttcgccaatgattcctcagtcattgaaaatcatgaagctgtctaacaattcctggcttggtgacgaggatgatgaggatgatccctttgcatctctagagcaaggattcgatgagatggatttgcaagctaatatcgtgagagataaacatgctagattgtgcactctagtggaaggattagtaggttctttaaaagtcactgtagagcaggagctcatttctgatgtctcagcacaacttcttgatgttctttacgaatcagaagatgctaagtctcttattattagtgcgcatggaatgcttccaattcttgaaattctagaaccatgcactgtcaagagtcgtcagagtatgattttacatttacttaaagttgtcaatactataatcttggataacgttgaaatccaagaaaatttatgtttcgtaggtggtatcccaataattactaaatttgctgcaagcaatactcaaatgagattcatgtttgttagtgctggtggtcttaacgttctcgttgagtttctcgatgaggactatgacgaatcccgagacctgctgctcattggtgtcaatggtatttggaatgtttttgaacttcaggggccaacacctaaaaatgatttttgtcgtattttctctagaagcaagattctatctcctttagcattagtactagatagagtgcttcacgaggacgatgatctttctgagctagtgcaaggtcgcattgtcaatatattctatcttttctctcaggccgagaactacgtcaaagaggtcgtggcagaccgtgtcgtaattaagcgtgttctcaaggatttgagtagaatgagaccagttcatcagatcactatgcttaaattcatcaaaaacttatctatgttatcaacaacactcgatagtttgcatgcagctaacgcaatcgagcttctaattgatcttcttagctcaagtatgaaaaaaaatcacgtgcaattccgagagatctcaaatcaagtattaaatacaatgtataacctatgtcgcttaagtaaagttcgtcaggaagatgctgcaattaatggcatagtccctctacttcagaacatcatgaaaacaaccgaccgcccacctaaagaatttgctctcccaatcctgtgtgacttagctcattccggcaaagtcggtagaaaatatctatggcaaaataaaggtcttgaattctatatttctttattagaggaccaatattggcaggtcacagcactagatgctatctttatatggctacaagaggagacagcaagagttgagaaatatctgcttaaaggaaactttactcaggcaatcgttgactgttttagccctcgaagagctaatgcatttgattacaatctcttagagcctttacaaaagctcttacgtttgagctcgccattggctgcatctcttgctcggccagatttatactctggtatgattcagaagctaaaccataaaaaggctgtgatacggttaaatctgttacgtattgtacgaagtatcagcgatcctagtgatgagttttcagttggaataacagaccataatctttttgaatcaataaagcgccttgctgaaagtgacaccgctgttcttgtccgcaatatggcaggagagcttgttagagcgaaactggagaagattccgagaatgagaatcagacgcacgttcaccccgccatcacttctcatggaatatcgacgcctataa

SEQ ID NO: 395 - DNA, 1929 bp, Golovinomyces orontii
  source 1..1929: mol_type = genomic DNA
atgatacaagcagatcaccaactttcaataacgaagaagcgcaaatttgagagcgatcatcaaagcagcccgcgtaaatcaaaaaatatcaaatcattatccgatcaagataatcacgatgacacgaccacagtaaagatacgctctaattctaccgaggaatcatcaatagatatgattgataaaagtaataaaaggctaaagaagattccaaaatccgactccgataattacccttctatcacattctctaaggattgcagacttcagtcacagattaaaatcagtgacttacagtctctaatattatatatcttagccgacggttcctccccgaaattcgtgtctattcgtaatcgaccacagatccgaaaggtcgtagttttgatgatacctggtttagaattatctatgtttaaaacatcagataatcaagaaaaagagccagcttactcatcacctgacttcttttatccaaaaaaattaatcacagaccaattacctgataatataaaactatttgcagaaatgtttgaatatgtatggcccgtaaaaacacctggagatgacaagtatatgagaatgcattcccctttacatgccatgctcacagcacctatacccagatctatcgaagagattcgggaatcgaagaccaaaaaaggaccaaaaacagcaaaggagcctcatggatggaagaacaaacctgctcttgttacagatttctgtcatactccagatgagctccttgaaaatgattatgtgctacacccagctttgtacgataatgatgaagaaaaagaaaaattgcaagaacatcgtcatctaacaaaaacttccaaagaatttggttgggttgacacccttgtagccaaattcgagaataactgggaagtactagctatggattgtgaaatgtgtttgactggagaatctgagtcctccctaacaagaataagtatcgtagcatgggataattcaatagtcctagacgaacttgttaaacctgaaaatcaaattaccaactacttgacccacctgaaaataactcacccatacataatcgacactgctctcttatatccacatcctcgaggtccgccattgaaatcctcattgaaattgcttgcccaacgttatctggtcgtgaaatccaaaaagggcatgcaaaaatgtgagaaaggaaaggaatggggagtctatgattcacatggagaaaatattttcaaacgagtcgctagaacaggggttcaatacaaatgtcaggaaataccaggttcgcttccaaaaactggtaagtccagcgctgcagttgattggggtaatccaggtaagggcccaggagctgctgcaaacttttccatcagttgcaagaatgatgaagaggtaatggaaggagttatacgagctattcatggtgatattgatggaaaagaaatcccgggaggtggtgtcgactttatctggggtcgattaagagaactggaagctaagaagggttggtggaataagaatcagcagaattctaatgataccacgcaaaacagggacaagtctccggatagaatgcaggccgaaattggtattgaggcaacatcagtaaaaccgacctcagtatcgaccagcccgctttcatctacaagtcatgactgttccgaaattatgtcacaagtcacagcagacctcacaaaacgcatctttaagatttattcatctctcccaccttgtacagcttttgtcatatacagtggctctggaaatcctattgagatgagtcgtttgcaatctatgcagtcaacttttaagcgcgaatacaaaaccaaaaagtgggatcaattaagtgtcaaatggactgacgtggaagaacaggcgctgcgaaaggctcatttaagggcgagaaatggggtgggttttctgggtatcaagtaa

SEQ ID NO: 396 - DNA, 1491 bp, Golovinomyces orontii
  source 1..1491: mol_type = genomic DNA
atgactatcttttccgcacaaaatcccagtgtctttgtgcttgtcactggacttttagttttctttttatattatcaatattcaaaacccaaaactcaacgtaatggaaaacctctaagatatgcaccaaattctcttccatttttgggtcatggactcatattcctgagaagtcgacataaattactatcatggtttgtaaaatgtgaacgtcagtttggattcgaaacatttttactctctgtacctagcatccctccatgtgtagtggtcaataatccaaaaaatgttgaatggattttaaagaatgaagctcttttctccaaaggctcatttatgaagcagagattgtgggatttattcggtaatgggatcattaacgttgataatgagctttggaagatgcaacgaaagtgtggattgaaatttttcagtaacaccaacttagagaatatctcgactctcgcccttccacactatctagatcagacagttgaagaactgaaatcctcagatcattcgattatcgatatggctaatatcttccatgaattgaccactcaactgatgggaagaatggcctataatatggagatacatcattcggaccctttttcccgtgcctttgattttgcttcgggtgctacagcagaacgtttccagaatccattgtggaaagtttccgaatttttcagttcaaaaaaatttaaagaagcaacatctgaaataatgtcgtttgggactttcatcgtgtcgaatgtgatgagagagagagaaagtggcttcacatgtgacgaaaaaaaagatttttttgggtcatcgtgtggaacattgatcgactcactgattgacgaaacaaatgataggcgaattattgccgatgctgctttatcttacttatcagcagggagagatacgaccggacaggcgcttacctggactctctacctcctcttgaaaaaccctgcacacataaggatcgctcgagagcaaatagagcagactcttgataaaaatggaatatctggcctcggagtccggccctccaatctaccatacattatggctatattctatgagtcactaagactttttccaccgattccgcttgagttcaaggagtgtcaacagcctgctattttccccgacttaactcacttacccaaaaacacaattatctgctggtgtacgtgggcgatgaataggtctagactgatatggggagaagatgcagatagcttcaagccagagagatggatccataataatgcgttcaaaccccgatctgttttcgaatttcccgtcttcaatggtgggccaagaatttgtctggggaaaaagatggcagagtcattggctgttcagactatcgcaaccctgatcctcggatttgactttgaactgcttgaccatgaagagagaatcagtaaaactagtttaactcttcctatgaaagatggattcccctgctgggttaaggtacgaacataa

SEQ ID NO: 397 - DNA, 1593 bp, Golovinomyces orontii
  source 1..1593: mol_type = genomic DNA
atggcgataaaccttgaatccttagaaccagctgataaagtaaaaactgcagagagcggaactgtagctgacagtcaagttgaatcggaaaatgaatatctcgatgagcagtcatcaagtattgtagcgactagttccaaacagaagaagaaacggtcaaagaaaaaacgctctaagcaaactgatatggaacctactgatccgtctccctcgacctccaaagaaatcaacagcttaaacaatgagcaacttgaggaattactgagatcgaatcctgcattgacaaaactactcgacgtcgaaggtgacatacaaccctcacctgaaaaaattcaagatgtattaaagcaacttaaactcgaagatataatgactagcttagcttctaatggaagaaatgtcaaggacatggcttcatataaattctggggtactcagccggtcccaaaatttggaactggtgagaaggttattgaagaaggcccattcaaaattattgaaccggagatgatacctcagaatcctggtcagcttattgatggtttcgaatgggtaactatggatctaaccgatgacaatgagattgatgaggtttttactctactttatggtcattacgttgaagacgatggatctttattcagatttaattactctaaatccttcttgaaatgggctttgatgtctccaggctggacgaaagaatggcatgttggtgttcgtgcaactacttcgcgaaaactagttgcatttatctcagcaattccagtaaccttacgagtccgtaaaaatattttgcacgcgtcagaagtaaactttctttgtgttcacaagaagcttcgatcaaaacgcttggcaccagtccttatcaaagagattactcgccgatgttaccttcgtggaacatggcaagctatttatactgccgggattgttttaccgaaacccatcagtacatgtcgatactttcacaggtctcttgactggcaaaagctctatgaagttgggttcagtccactccctgctaaacaaacatcgacaaaaaacttaagacccatggagaccagagacgttgatggagttcttagactgttaaagaggtacatggagaagtttcagcttgggttaatctttactaaggaggatgttgagcactgcggcggcgatcagataatctggtcttacgtcgttgaagatcctactacaaaagccctgactgactttttttccttctactcacttgagtcttccgtcattaatcacaacaagcataaaaacgttcgggcagcatacatgttttattatgcctctgaacatggtttgtctaaagatatccctcaagctgaatacgctaatcacctaaatactctcgtcaacgacgctctcattatcgcaaagaggtacaattttgatgtcttcaatgccatgacattaatggacaataatcttttcctggagcagcagaagtttggtgctggtgatggacagttgcattactacctttacaattacaatgctaatcctattgctgggggtgtggaccagaaaaatacaatcgaaggtctaagtgaggttggagtagtcatggtgtag

SEQ ID NO: 398 - DNA, 699 bp, Golovinomyces orontii
  source 1..699: mol_type = genomic DNA
atgccagagatctccaaaacgttcaatatcaaagccaagcataaaatgccagagactccaaacgttcaaagtaccagagatgcctcaagcaccccaaatgccagggtctatcaagcgatcaaagtaccacagttgccagacgggcctcaactaccgcaagtccttgacacagtcaccactccacttattgatgtttacaacattcccaaatcctcagcaatcttacttctcaaatccatgaaacaagcggttatatacctcgtaattatcgatctctctaagtcattagtcaacatcacactcaactttattcaagcagaaattcaaggttctactttgaacacctttcaattctcatcgacgctatacgaagattcttgcctccttggtgggtgtttggttggggctataaatacacacctcccgtctttcccaatcaccctcatccctcccaatcctccatccgaatgtagtgtgaaaccattttttaacggtgtaattaaagatattttacgaagcctcaccaatactcgatatgtttgtcgtcgtgatcacatatattccggcctattgcctagcgttgtgggcgaatttatgtctttggtagtcatcttacgagcatggcgtatattcacaagcgtgggaactataatgcttgacgtctcccctgtacagatattgcctaatgcgcaagtttga

SEQ ID NO: 399 - DNA, 1662 bp, Golovinomyces orontii
  source 1..1662: mol_type = genomic DNA
atgtactctgcaaatgagcttttcgccttcgaggatcagagtgcccgagaatggaagaccgactctgttgagccggccgaatccgatcctggaaacaaaaattcaatcttgtatccgaatgataatctccagaaccttgtcgacctaactcatacctctgggatcgctaaagatgaacaaactacccccacgaaccatcaatcaattgccgttgatcgtcaagaagttagaagtcaaacgtttgaacgcattaaacctcaccctatcgtagaaagattaaaatctgaaaataaaaacactcatgaccgagacaagaagagatatacagcaagcttaagaggtggcaagtgggcacgacccgagcctttggtcaccgatagacttgcctcacatcgccgtgttttggctaatgaagaagctgaaaaaaaacgatatcttgatcctcctccaataggaaaggataatttaccagtttggggatgttatatatggccgtactggtacgagtctgctatgactcttctaggcccgagacttgaagatctgaacttaattaggttggataaccgagtttggatagagtgggatgaagactccaaatgtataaatattagctcacttgccgtatctaaagccgatgtggtactagcgaatacaatcaaaggaattcgcgacgttgttgagcacgcaaaagccgctcgggttactgcaagcccgttgcacctagttcaccctccgacttctattgcggtcggaacattaattaagccatcgatcctcgaaaagaatcccttaaaagcatcaaaattaattcttgtacaagaaaatttcatacatgaagaagattcagaatgggcatctatccgtgataaaaagaaacgatcaaatgttcaattactccaggatcacctaattaaaaccctcttgacctacagccccctaaagcattggatgcgaatgcgtatccactttggaaatattgtcatgagcaagtttaccagtgagtttgccggaaatggctccacattttctgcttttggggatatggtagctgctccacgattctcagcagtaattgatagaaagatggaaggagagatggacaactctttcgacaattcaagacaagcttttcagatgggtagtatcaccttatacaaagataatagacgaaatgtgcttgttgaaacaagaaccatcgacgtcgaaaggggtctagactggaagcttgaacttatagcagataacaaggacaaagtactgaatttaccacccgaactccgcactctcataaaagactcagtcccaactaatacaagacttcgaattgacccacttggtctacagtttccagatgtatcgccaagaccaaccgatcctgtctgtatatcttcagtgtgggtaagaagcataatacagtatcgaatgaatgaatctggatatgtagttgagattgcgatctaccgaagatgggcagctgctaccactgagggggcacctgagatgttctgtagtatttccatgttccatcctgattgggatgatgagacacaagacatttcgtccaagtcatttgtaagagaatggaaagacgatctcagtaactttttcaaggaaggtgatcggtgtgaggagaggttagagtatcgatcaatcagataa

SEQ ID NO: 400 - DNA, 1440 bp, Golovinomyces orontii
  source 1..1440: mol_type = genomic DNA
atggatctagtttccgttcaagaaattgataggaaagcgcggcgtattcaacaaagggcagatgtattgatagtcggcgccggggttcttggttggaggagtgtggttttacttgaaaggtcattaaagcaaccggatcgaattgtaggagagttattgcagcccggcggtgtttctgcattagagaagcttggactagctcaatgtcttgagggaatcgattcaatgccagttcatggctatcaagtcatatatcacgggaccagtgttagtataccgtatccttcaccaaagaacgaagatactggaaagcatggttacacaagcttgaaaaaagggaagcctgaagggcgaacttttcatcatggtcgcttcatctctcaacttcgaaaagcctgcttcaatcacccaaatataactgtcgtggagacacttgtcttagagacaataaagaacactctgaccgatgtagttttgggtgtaaaatcagagacgatgaatgaaaagacaaaaaaaagagaaaaatactttttttttggcgatctcacgattatcgctgacgggtatgcctcaaaatttcgtaagcaatacattgacaaatcaccagtcgtaaaaagtaggttttacgctctggaattgattgattgccctctaccggtcccttattatggaacagtcattcttagtgatgggtctcccgtattattgtatcaaattggcacgcacgagacacgggctctgattgatgttcctgagaatactccttccgcatcggttgccgcaggtggcattcgtcatcatattcgaaaagttgttttaccttccttaccatcacaaattcaaccattctttgaaaaagccatggaagatggtaaaattcctcgcagcatgccaaatagttggcttcctccatctatgcagcaacaaaagggggttatcttgctcggagatgctatgaatatgcggcatcccttaactggcggtggtatgactgtagctcttaacgatgttgtctatctctccgaactactctcgccagatcgtgtacctcacctggaagatactgctgccatccagagggcgatgaaggaatttcactggaaacgaaagagcctatcaagtgtcattaatatccttgctatggcactttactctctttttgccgcaaacgatagacaacttaaagctttacaacgagggtgcgggaattgtgtagatggccctgttggattactcgctggaatcatcagacaaccaatcgtactcttttaccacttttttgccgtcgcctttgttagcattgggataactgtatcggagatcatgggaaatttatttggtatctggaagcttcctttggcaataagcgaaagtacttttattttttggaaggcttgcgttgttatcttaccaatcatttttagcgaaatacaaaaatga

SEQ ID NO: 401 - DNA, 756 bp, Golovinomyces orontii
  source 1..756: mol_type = genomic DNA
atgagaaagaacccactcctggctgcacttttattcccgataacgtacgcagtttcgctctcaaactttgagcgtatatctccttccgtgccaaccagatgtcaagaggaatataacaatgaaattccgttttgtttgcggacagactttaccaatacttgttcacctcactgtataacaggtttatatgcaaaagccgaagaagtatctagtgcatgcgaaaactttcccgcgactggaaattctctattaggagttgtattaagcgggggaatggtacatgcattgtgtccacaaccaaagtcaaagatgtctaaagttccatccacggcgaccccgacaacaagtaagctaaacgccgatcctacgactctctttttaaccacaaaaagtacaccaacacaaagttttggaccagagattacaacgtcacatcctaccactttatctggttttgtaataataacttcaagctctatagtaactgcagtatctggagcctcaactacttcaaccaatagagatgccccagccctaacgatatcttccatctcaaaatctagccaaaaccaaagcccaagtccaagccccgacaagtctgataaagacccaaaacaaaaaccatcttcggataaatctggagggggaagtccattcgatgatgagaactatgagagtaatgcaactcattctgaaaagtcgtcattttatgctatggtaatatttttcatatgggtattcattttccaacggtga

SEQ ID NO: 402 - DNA, 1437 bp, Golovinomyces orontii
  source 1..1437: mol_type = genomic DNA
atgtctaaaagaaaaagaaatgtaaagagtgactctgctggagctaatctcgaactcgaaaacaagaagataaagcccttgtcatctccaacaagccctgaatcggatctcaaagcctcaattactattcagttagtagcgggatcttatgatggaattattcatggagtgacagctaaaatcttacctaagactgccgaatttgccgatacatttctttacaccgctcacaatgctgctattcgctgtctcgccttatcaccgccgtcagcacctatcccaaacaagactcgaaagatttatcttgcaagtggcagtacagatgaaagaattcatctttatcacctatcagcgcatgcaccatctaaaaccacggttcctacaattcctaatataactcaaaatcccatcctcgagaacccacaaaatcgtgaattaggtgctctattacaccattctagtgcaataacagcgctctactttcctaatagaggaaagcttttaagttctgccgaagatagacaaatctctataatccggaccagggattggaatgttttatgctcgataaaatcacctataccaaagcaaattggaaggccaagtggtgatacagctcctataggaggtactccgagtggaatcaatgacttcgctgttcacccgagtatgaagttaatgatttcagtaagtaaaggagagaagtgcatgagattatggaatctggtcacaggtaagaaagcaggtgtgttgaattttgataaaagtcagacagcgcaattaagaaatgggaaatactcatcaagagaaggaagaaaagtagtatggggctctactgacgagggcgatgaattttgcgttggttttgaaagaggattaatagtgtatgggatggacagtaaacctaggtgtattgtcttaccacaaaaaataaccaaaatacatcaggtgaattatttcgaagtttcaacggacgatatgcctctggcagtatctacggaagatggaagaataattttctattctacaaagtcagatgatttaagtgtgtgttcagacgatgaaatgaaaaataatacactcccatctgcaaaacaacttgcacaactcggtggagaaactgtaggactcactggacgaatcaaagacttttccatattgcctgttggagaaggcagcaccaaatcattcataattgcgacagcaggaagtaatggcgacctgcgactctggcgaatccaactgaatgatctaaaatcgcaaacagggccaactaaacagattggtacagtactggggagctacatgacaaacaatcgaatcacttgtctaaaggcatttattatgttccccagtgaagacaatgaggatgaagacgaaatagatcaagaaaattacagctcggatagctcagatatcagttccaatagtgattaa

SEQ ID NO: 403 - DNA, 1185 bp, Golovinomyces orontii
  source 1..1185: mol_type = genomic DNA
atgtttgacgagccttcatcttatttagatgttaaacaacgtctgagtgctgccaagataattagatcacttctacgacctaatgactatgtaatctgtgtcgagcacgatctttctgttcttgactatctatcagactttatttgtgttctctatggtcaacctgcggtgtacggtgttgtcacgctgcctgcttcggtaagagaaggtatcaatatcttcctcgatggcactataccaacagaaaacctacgattcagagaagaatcattaaccttccgaatttctgaggctgcagacgaatttatggctcagcgtacacgatccctagattatccaactatggaaaagacgatgggcggctttcatctcaaggttcatgctggtgacttcaccgattcggagatcattgtcatgatgggcgaaaatgggactggaaaaactacattttgcaggctactctctggagctctaaaaccagatggtaatcaaactgtttcgggaatgaaagtaagtatgaagcctcaaaaaattactccaaagttcgaggggactgttcggcaactgttctttaaaaaaattaaaactgcgtttcttttccctcaattccagacagatgtggtcaagcctctcaaattagatgaatttattgatcaggaagttaagacactctctggaggtgagttacaacgcgtagctatcgttctagcacttggtttgccagcagatatctatctcattgatgagccgtctgcctacctcgactcggagcagcgtattattgcggctcgtgttatcaaacgatttattttaaactcaaagaagacagcatttattgttgaacacgactttattatggcaacctacctcgcggatcgtgttattgtgtttgatggacagcctggaatcagtgcaaaagcgaatgcacccgagtcgttactttcaggatgtaacaagttcttaaaaaatttggatgttaccttcagacgcgatcccagtaatttcagacctcgtattaacaagctacattctcaattagaccaggaacaaaaactctctgggaattatgtaagtcagattggaaacaatttacaagatatttctaactacgatcctagttctttctggaagacgcagagtgacgtaatatcacgtgaattaccccctgacgaaattaatccataa

SEQ ID NO: 404 - DNA, 339 bp, Golovinomyces orontii; identical to SEQ ID NO: 179
  source 1..339: mol_type = genomic DNA

SEQ ID NO: 405 - DNA, 711 bp, Golovinomyces orontii
  source 1..711: mol_type = genomic DNA
atgtctcaagcactagattcgccatataaaacgagattcctcgagacttgcatcaaagaaggagttctaaaattcggctctttcaagctaaaatctggacgtctctcaccatacttctttaatgccggcgagttctattcagcagaaatgctacaagctctatcattagcgtttgcaaacactattatagagacggactcttctcccccagcatttgacataatatttggtcctgcatataagggaatccctctggcaactgctactgtaatgaaactagcggatctaaatccggagaagtatcgaaaaatatgttacagttttgatcgaaaagaggttaaagatcatggagaaggtggtctaatcgtgggggcccctcttaaggatatgagggtactaatcattgacgacgttgtcacagcaggtactgctaagagagaggcaattgaaaaaatacgaaagcaaggaggaattgttgtaggtatccttgttgcactggatcgtatggaaaagctacctacacaatgcggtgatgatagtaaacccatgccaagcgcaataggagaattaaggagagaattcggcatcccagtatattcaattttatcactaaatgacattatcgatggcttgcaggcaatgggaatgcatcatgaactggaacagatgcaagaatatagagctaagttccagccaactgaagacagctag

SEQ ID NO: 406 - DNA, 615 bp, Golovinomyces orontii
  source 1..615: mol_type = genomic DNA
atgaatcaaaaggatccaacagacaagacacgactcgctctacatttggcagacagagctttatctccaatcttttgctctgctaacgctgaagcaacaactgacatatcgggagtcacccagctcactgcttacgacatatctcaacgggtcggtgcaggcactcctctcagaataattgttgaaacgaaaagatcgggtcctctactgctgacttcctatctaaacccaccatccactggcacgcgtgataatcagagcagctcaagaaataaaacaaaatcatctggcagcgacattagagacttaggctgtcgatctgagtccgacaaaattggattttcgactaaatgcactcaaaaatattttacaaatactaatgattctactatcggacaagatttcaagaatgagggccaaaatacatacggctattcaccatcaccacccttactaatcgcatccgttatcgcacgtagctcgaccgaggctcctgaagccaagaaagcaatgacacgacttgtaagagctgggcgcgaatgccaaattgcatggataaaagagcataccgaagcgcactcatctcgagtaccttttggaggaagtaacgtttaa

SEQ ID NO: 407 - DNA, 1245 bp, Golovinomyces orontii
  source 1..1245: mol_type = genomic DNA
atggctgaaaaagaatctggtttcaacttagagacgtgtgcaagaccaaatatactttcacttgaaccataccgatgtgcaagagacgacttcaaagatgacggcaccaatatcctactggatgcgaatgagaatgcatatggatcatctgttctaccaccacaatctctagtctcatcgcaaattcaagatgggtctcttgttaaatttgccaggctacatagatacccagatccacaccagcatgaacttaagcagtgcttttgtgaacttcggaatactcatattcacactaaaaaaaaaataactcccgaaaatctcttccttggtgtagggagtgatgaggcaattgacgtcctaatccgctgcttctgtattcctggtactgataagattctcatttgtcccccgacatatggcatgtattccgtatgtgcgcaggtgaatgatattggtttggtcaaagttccattacttccaagtgcagatttttccatcgacgtacaatctatactctccgtattatcttctccggattctgtccaaatcaaaataatattcatttgctccccaggaaatcctactggtaccttaatcaaaaaagtagatatacaacaaatattagaacatccaacatggaatgggatagttgttatagatgaagcctatattgatttcgcaccggaaggctattcgttagctgaattggtagtggaatgtcctaaccttgttgtcatgcaaacattgtcaaaagcctttggtctcgcaggtattcgtctgggagtcgcatttacttcacgtcctatcgctaccctgctcaataacctgaaggctccatacaatatcagcagactaacatcagaaattgcactcaaagcattaaatcctgctgggttaagcttaatgagaagcaacaagcaaaaacttgattcgcaaaaagaaagactcctggaggagctaccaagattgaaggggattgggatgtttcggggtggtaaatcaagtaactttcttttagttgagatcttagactcaaagggaaaagtcaacaatgctacggccctacatatttataaacgcttagcaaaggaaacacttgttgttcgatttagaggtaaggaacatggatgctatggctgtttgcgtattacgattggaactgaagcagaagttaccgcccttcttgaaaaactaaaagacgttatcattcaggttcatgcagaagaaatacagtcttcgaagtaa

SEQ ID NO: 408 - DNA, 1104 bp, Golovinomyces orontii; identical to SEQ ID NO: 102
  source 1..1104: mol_type = genomic DNA

SEQ ID NO: 409 - DNA, 2562 bp, Golovinomyces orontii
  source 1..2562: mol_type = genomic DNA
atggacctcaatccacctgcttcctccttcaaagaccatgtaacatcaaaacagagccgagataatattaaagttcccattaagctgaagaaatctactagtacaggacttttcaggctgttcactaaaggcgctcctaacaactcaaaacaggatttacagtctgtgtgcaaagcttcaattgagccttcagttacggctggattacgagatataggtcttgaagtcgtaccttgtaattttatccggccatcaggtttgaagctggaacctcgaagcgagctagatacccggagagtcccaacaaattccgagttttcacttagttcacgacgtggaacgtctcgaaaaaccatccccgatgattctcatcctaaccgaatggccaagctgaatgaatgtgatgtgccaagaccgaaccaagccaaagcaacattccagagccgagctacaaaggctcgcattctcataaaagatatagatgagaaccaaggaattaataataattatctctcacttcagtcccctatcatgtctccggtctcccctgttcatgaaacaggcctcccggcttttgcaagtttaaggttacaatttgttgttggcaggattgctatggactttgaatcttctgcccaatggacagtatggctaaattcgtactcaagaggtcaattcaacgtcaacaatcctcctgaacatccacgtctcagcctgacctttacccatctacccgccgtatatcccgaagatgaggaaaagcgagttttatcaagtcgggaatttgaagatgtttcgcaagaatggacaaaaagaagagctcaacttcacttaaactcagcaatgaagagatttgggacacgttacggggctgtcagctttttcgatgacgattatgaagtattccaggctgaaaatggttacaatgtactgaatgtacaaaggagtagcagtatcgctgcccatgccctatatacaacggaaacactctctattattgatgccgaacaggactggcgatttcgtgataatcctatggttactggaaaacctcacataaaattttttgcagcgacacctttgcttagtacaaacggcaaggctataggagttttatctattttttcccgcgaaaaacgtcactcattcgattacgacgaccgacttaagctcgcaaagtgtggggccgctctcgctgctgatctaagaactcagctcagattcgttcaagatactcagcccataacacccacctacaaaatattagttgaaaattccttgccatcaataacttctattgtgaaaaaagtttccccacctcgcagagatccgatcatgaaagacatccaatttaatcgtaatccaagcaaagtggaaaaaaaattctctcaagatgcatcatcgtctcctgtattaagatatccaatgtttggatcgcttgtccagccacttgatcaattatttacacggcagaatcctggaatatcacacgtgcctgcggaacacaccccaccttcttctgtagaatcaagccaaggacctagttttaccaacgaaaatgatttgacagcgcgtaatcaatgtagcttcgctgtacgaccaagcgctgaaagcgttacactatcatgtcgaacatcgagtacctcagaagtcgactccagccgtacttctaaaactcacaatgggtgtaaaacggtcatcggagctgtattgtgtgaagggtctaaggatgatgtaaatatcggttgcgatactccacacacttattcatcgttacaatcgccctcccccccgccaaaatctctccgaactaactctgctctgaaagatgtggagtcgacctctcttgactccagatgcctccatgaatccgaacatcggtcaagtaaggaaccttattcctcgaaagatttcacattttcagatctttcctttagttcttctcctaatcctcatagtaataaacaacttcaatttttgcaccccaatttagatattacagtagaggatttcctatccttaggtgatagtgacctattagaggagtctgaagaaacaatcttaactgaaaattttctaacgaatgtctccaaggccccaaacgctgggccttgtgatgaagacccttctagagaacagataactgggataaagcatgaactagaatacaaatttgaccctaaagataattattgtcgagatccagatgcatcattcactccacgccttcaatctatttctaagatgcccaagagctttctttcatggaaatttcctgaaaccgagcttagagccccacctgaagatgccccgattttaaacgacactagttctaggtcttctggtacctcatcgagtcttataaatgagacaattgagaaagatgaagaagatgaagttctcaaaaaatcttcacctaaacccagagatccgagtacggatgacaatatggaagtgctatcatcatccttgagtaacgaatctttaaaagcatctcaggcaggtgattatccaaactcttcaaatacaaatcagacttccatgcctaatattcatctttga

SEQ ID NO: 410 - DNA, 240 bp, Golovinomyces orontii
  source 1..240: mol_type = genomic DNA
atgggcggacttaccacttatcgtctcttaggtggcaaggccaaaccactaaaagctccaaagaaggctgcgaaaggcgaaatggatgaagaagataaagcttttcaactcaaacaaaaagcagaattaacatatttgttagatgccaaagccaaggctgatttggcagccattgcaaaaatgggtaagggccctcttaataccgggtcgcaaggcataaagaagagcggaaagaaatag

SEQ ID NO: 411 - DNA, 483 bp, Golovinomyces orontii
  source 1..483: mol_type = genomic DNA
atgtcggcaactcatgcacattgggcgctgccgctgacgagaggaaggcacccagatgtcgcaaagcagcatctttcgggacggaattacgatgtagagacaagaggtccaaagcttggcttcgaaaatcatcctaatttagccgtcaaaacaacccttgaacagcaggcttcaaatattgagcgtgatattctaaaacaaaatgaggaagagcaagaagataggggagacctcgaaaaagtgctacagatattaaatattcgaacagaaaatgcaattgccaggctggttcgggaaagaattgaaggagctaaaaattctatcgaatcaaaaccaaaaccaagcacaaatataaatagcttggctcaagataacgatgaagaaattggtatcgacggtgttgagttagttgaaagggtcaaattgcgagagaaggcagataaagaagaagagggaattaattccgatgatggcgagaattag

SEQ ID NO: 412 - DNA, 1794 bp, Golovinomyces orontii
  source 1..1794: mol_type = genomic DNA
atggcgccagcttatttttggcttaacaaggttgcgaaatatagaatcgaaactactaggccaagtgttgttccaatagacctaagcagtctagaaatccggatctctgagaaggatatcagtactctactacaagacatcaaagaaggggtgctacttcaaagattggttatggccagaattgatggtaaagcttttgcacagccatccaaaccaagcgctagatgtctagaagttaccgctgcaaagtcaattgaagctcattgcctacctagtggagcgattgctgacattctccactgcatcataaaacattatttacagaatctaatttcaaacgaatcatcggagcagtccagaatcgctattcgaatatgtcatttcatgtatggtataccatctagtcttgtgctcccgctgagtaactactcatcatttctattattatcaaagcttcctcgaccatatcttagagaattttatttttatgtctcagaaaagcatgaagaactctcaatatggacccttatgcaattcggatctaggcttgccaagtttggtgatgttgacatagcattcgatgccattcagaagctcatgatgtcaaagtgtcatctttcaaggtctaatactcttagtgtctgcacttcgttacttcataataatcgccttaatccaaattcccagactaaaactttcgaaatatttcaatatcttatcgggtctggagttgagccaaacgtgtacttgtacaacgtcattttacatgatattatgcaaaacaaagaaccacaaagtgcttggaatttttatgaaacaatggtcgtgaaagggattgaaccagatgtcgtaacctactcgattttgttaaatgatgcaaagaagagagtagactcacaggccatgactcatattataaaaataattcgacagtccggtaaaaccagtaaatatattgtaaccgatattattcatgccgtatttcttttaaacaaaaaacagccaaaagcacgaagagagcctggtctgggagatagcaaggaacctcgacctgtgtttgagcttatgttgcaagtttacgtggaaaactttaaactagatcaattgtttcaacttcttccaggattttccaatatctgttcactcccatctaatatggatcccgaaaaatctctttgggaaccccccctgcaactctatgctcttgtgcgaaccggacacccagcagtagcgtcgctcgtaaagacaacatatatatataacgctattttaatgtgtttttacaggtttgaggaccgagctaaagatgcacccaatgtcgtagcagatatgctttcgcctgatcgagatatacctcttcaaatgccagactctccaacgacaaatccttccagcatttatattgaccataattttgaatcttcaaatcccaaagttcacgaggctgtcccgcattcccctgctaagcctgatctttatacatggtcgattctcgtaaaaattttcatgcgtctacgacacactcgcgcggccgaaaaggtcctcagtatgatggtgcgcagagacattaaacctactcttattacatggactagtcttatagctggctatgcgcgtatgcaaaatatcagtatgacagcagatgctgtaaagcgacttgaggaagctggctatgaatctgacgattttgtttataaagcattgtttaaaaaaatcaaacctgtatcacccgcatggatcgatgatctcaaagaagacttggcagttgacatagcagaaaaagagccggtatag

SEQ ID NO: 413 - DNA, 1056 bp, Golovinomyces orontii
  source 1..1056: mol_type = genomic DNA
atggttacaaacaaagctctcattctaaagagatatcccaatggaatgcctgttgcaggtcaagatctcattgtggagtcacgcgatttcaaacctgaatgtcctcctccggaaggcgggatcgtgacgaagaacctttttgcttcttttgatccttacatgaggtctcgcatggacaacaagaataatataccatatttcgctccgtttccactcgaccaacctattaccagtctttgtatagcaaaagtactcaaatcagacacgtccaagcttatcgagggacaacttatcgttgcatttataccagtagaagaatactcacaactcaccgaggagatgttgaaaatgagcgactaccatatcattcaaaacccttattctcttgatattgtagagtttcttggccctctcggcatgcccggtctcacggcttatgcctcactctttgaaattggcaaaccaaaaaagggagagacgattttggtctcggcagcatccggtgccgtcggtcaacttgtcgggcagcttgccaaacgcgaaggtctacgggttattggctcagtgggctcagacgagaaattagatttcattgtaaaagagttaaagtttgatggtggattcaactacaagctggagaatccagtcgacgctatcaaacggctggcgccggacggattggatatctactatgacaatgttggtggggaacaactggatgcagcactagggctcatgaaacgttggggacggattgtcgcatgtggtatgatctcccaatataataaccaagacgaccaaagatacggcatcaaaaacttgatgtatgtagtgccacttagtcttacaatgcgaggcttcgtagtttccagtccagatatgggacccaaatatttcgaagagagaaacacaaaggtttctcaatggttgagcgacggcagtttgaagtctaaaatacacgtcactgagggaatagagaatgctcctcaaggattagtgggtttgatgcaaggaaaaaactttggaaaagcagtattgaagatggcagatgattga

SEQ ID NO: 414 - DNA, 996 bp, Golovinomyces orontii
  source 1..996: mol_type = genomic DNA
atgacgatggtaacttcaaatatatcagctcatgtgccggcatggagaaggatcggcctcaagctgaaatctcagcaagtgtcacaatcgaccgagacgacagaagtagtagtggaagaaaagtttctaaaacgaaaggcagcagtgtcgaacggagacgatgatgaaggtaagagagcacaaaagaaaatctcaagtaattcttcactggagagaaaagggacgaaggtaaaaagacttaagtcaggtgtttccgttgagatcccggaaaaattagagtccaaagttacgaaacagaataagacagtgacaccaccatttctcaattatcttagggaatatcacaaatcgagagagacgtggaagtttaagaaaaatcaccagacacatctcttacagcacgttctcgatgtaaaagttgtcccatccagtcacgcccacttagtttatgcatatattagaggcttgaaaggacaggtacggacaaggcttagagataaggcccttgctgtaaaagtcaaagatcaggaagatggtgcagctggattcccgtcaaacatgctcaatcaagagcagaaacagaaagagtatgaagcggctatagcaaactacattaccactaactcgacctctgacatacgaaaacctggccatgaagagcaattcttgttgggctctagtgacgagctgataaaagatcgaattgtaaagaggataagagcagagatgataataaacgaacttgcatcctgctctgaaccagataaaagtactcagaggactgaaaaagaaatgaacttggtagagaaacagccaataggtaatatagtgcagaagaatgttcgcaagcgaaaacagaggactataaatgtccaagatgagtctagctcagactctgattctgattctgattctgattctgatgataattcatcaggctcctcaaccaaaagccctaattcatcatccagctcggaatcagacacagatgaataa

SEQ ID NO: 415 - DNA, 1554 bp, Golovinomyces orontii
  source 1..1554: mol_type = genomic DNA
atgaaggcccgcctcccctggcaggcccctggcgattaccgaacaatcagaaatacaccgccacctgctcggaaacgtagtttgagcgatgagacaaagtttaatataaactatggcttacacgatttaaaacgccgaaaagatcttactgcactcagaagtcctatctcacctctacagactaagctagaagaagaacctgaaaatcacaacgaattacggcttatagatcaggaattggccaaatgtcaaattgctcttgagcagttaaggcgctgtcatttgatcccttacccgataaccttggatactcctgaggcaaagttgaaagttagtgacggaactggtcctgctatttgccgagataagcgaactataccatgggctcctccatttggagtcactgatggcccatatacccgtcattacgctcgatggctaattccagatcctagctttgatggagtggcctggaaagaaacgagtcagtcacgttcaggggaaaactttactcatgggcgtgccacaaggcataggtctaccgagggtgcgactaaagttggcaagatgggattacgaggagttactagtcaaaaacttcacgcactctcaaacggatatcctcaagcaaaggataaagttggaccatgtatacttaagcgtggagatggtcagactgtcaagctagtttgcctcgattgccatcgtgagaacttctcaagcactcagggatttattaatcattgtcggatctctcatcgtcgagattttaagagccatgaagaagctgcgaatgccagtgcaacttcaaatagtcttgttcatcctctcatcagaaatgctccgactggtaaggaagccaaggacgcatgcagagctctactagctcgggtagcagattcaaaggcaatgcttcgtgagggcagattacctggattccgtctatacccaaaagcgcgtgttcaaatacccacacttgaatacgtcaacaacttcttcactacgccacacctatcagaactactgcagcacaaaggtttccagaagatcgccgacaagggagttaaaagaaaactaattgaggaaccagcttgccccactactctttgtaatgtatccatgagtgaaaatcccaaaactcccaagcaaaatttactacacggataccacaatgatggccttgaaagacacatcaatgaatctatcatcagtgatcttagtccacagactggcaccagtaataatgcaccgagtctagtgagtgatgatggagaatatgacgaggatggaattgaaagtacaaaaaccgaagatgaagacgatcaaagtgatgtcgcagaaatcgggacagaggaagaatctggtcagaatgtgctcaaaaattgtaccggtggaagacaatttgtaacctttttgaagatcagtcaatttagcgatccccaattgtccgtgacgctctccaagaaagggtatctagatgtttcacgtttgatgcctactatagcccgagaaaaaattagatgtacctttgctacagccgaaaatctattttga

SEQ ID NO: 416 - DNA, 1602 bp, Golovinomyces orontii
  source 1..1602: mol_type = genomic DNA
atgacatctcatgatctccgcgatttaacagatatctctggagacgctcgacgaccagcgaagaaacagaaacaaaatggtcccaagaactttacgctcaaacgcattgcgcgtgaagttcaaaatttaggttgtgatagtcctatagcaataatacccgaatctttaatgtacaagaagaagcggcttggaagtcacaagcccgtttcgaagtgggacttgaagccatttaagaatactgctcgagatgatcaatcgttgattcttagacattggaggaggaaagaagaggcaactccgaagctagatgaaggggcgtcagcatcatttccggaatctgaaatcgaggattcagtgttcgcgaaattcaacgttcggataaagaccgtaaattataacgatgaacaatacagagcgcatttccagtgctcagactggtcaaaggatgagactgattatctcatgaagctagcagaagaatttgacctgagatggccaatcatctgggatcgttatgactttcaacccaagtcttcagatatgaatagtgaaggagaaagaaaatactaccaagtttcaagtggaattatgcaacttaccagagataaaatacatttgacttctcacgaatgtaatattctagaatctatgctcaagtacaataagcaacaggagatttcccgtaagaagtttgccgaggtctcgtttcatcgcacaatagaggaagctctagaagaagaaaatcttcttttagagcttaaacgattctggcacgagttgtatgctctgcttgatgcaccgcctacaaccaaccctatcggtgcatatacatccagtcaagggctacagcaactccttgcgagtttggttcaagctgataaggctaaacgcagtaaaagcttaaatgtacctgctgttagtcctgtgggccctaatcagacaattcaaaataatcaatatgtcgattcacgacgagaaaataatagtcgagacccaaatcctgggtcaattcctgccaacaaaaaattaggccaagtatcatctgaccaccgccagctgacacccgaagaagaagttatgtttggtgtaagacaattcgaccgcataactgctacgggtcctgcctttcggcatgataaaataatgaaattaatgataagcaaatcagccattcagcaagcaaagataagtaatattctttctgagctacgaatcccacccagacttcttatgcccacgtatcgagtgggtgagatatttgagagtttacagtgtgaaatatctgtacttcttgacctcaggaaagttgcagataagctacagggagagatatgcgttttgaaatcattgaaagaggagagagaaaagttgacccgaacgaactgcagtgagaaagatcaagaagacacccacctcgatgaaaattccgtaaaagagaccgcagttgaacatccaataccaaaaatagaggtacaggggaacgatgaggaagagggctctgactttactcttaatttccacaagagaagcactagcgttgcaagtaatcagagtataagcggcgcaagaaatagaagtaaaccgactcctcaatataattaa
